(19) United States
(12) Patent Application Publication
(10) Pub. No.: US 2024/0384293 A1
(43) Pub. Date: Nov. 21, 2024

(54) VIRAL VECTOR PRODUCTION SYSTEM

(71) Applicant: Novartis AG, Basel (CH)

(72) Inventors: Astrid Bosse, Birsfelden (CH); Benoit Bossuge, Sierentz (FR); Laurence Croute, Village Neuf (FR); Lars Ellenrieder, Freiburg (DE); Laurence Guianvarch, Mulhouse (FR); David Schmitt, Hirsingue (FR); Eleonora Toffoli, Basel (CH)

(21) Appl. No.: 18/288,345

(22) PCT Filed: Apr. 27, 2022
(86) PCT No.: PCT/IB2022/053880

§ 371 Date: Oct. 25, 2023

Related U.S. Application Data
(60) Provisional application No. 63/180,423, filed on Apr. 27, 2021.

(51) Int. Cl. C12N 15/86

(52) U.S. Cl. CPC C12N 15/86; C12N 2740/15043; C12N 2740/15052; C12N 2750/14143; C12N 2760/20222

(57) ABSTRACT

The disclosure provides, at least in part, to a method for producing high titer lentiviral vectors, and for producing lentiviral particles carrying a transgene of interest and under satisfactory safety conditions. The disclosure also provides at least in part, methods of purification of such lentiviral particle, e.g., from a cell culture. The disclosure also provides a formulation to lentiviral preparations that maintain structural integrity of the viral vector during purification, storage, and gene transfer events.

### RELATED APPLICATIONS

[0001] This application claims priority to U.S. Provisional Application 63/180,423 filed on Apr. 27, 2021, the entire contents of which are hereby incorporated by reference.

### BACKGROUND

[0002] Viruses are highly efficient at nucleic acid delivery to specific cell types, while often avoiding detection by the infected host immune system. These features make certain viruses attractive candidates as gene-delivery vehicles for use in gene therapies.

[0003] Among the viral vectors available for gene therapy applications are lentiviral vectors. Such vectors include reconstructed viral vector systems derived from human immunodeficiency virus-1 (HIV-1) and are capable of introducing a gene of interest into animal and human primary cells or cell lines. Lentiviral vector-mediated gene expression can be used to achieve continuous and stable protein production, because the gene of interest has been integrated into a host cell's genome and is thus replicated upon division of the cell. Lentiviral vectors can effectively transduce non-dividing cells as well as those actively progressing through the cell cycle. Tissues and cells in which lentiviral vector-mediated chronic expression of a gene of interest can occur include the brain, liver, muscle cells, retina, hematopoietic stem cells, marrow mesenchymal stem cells, and macrophages, among others.

[0004] The large-scale production of lentiviral vectors has been hindered by several challenges, such as low titer of the viral yield and low stability of the vector. Additionally, Lentiviral vectors are susceptible to inactivation during purification process which can contribute to diminished final quality and efficacy of the vector preparation further creating another hurdle for production of large scale of purified lentiviral vector. Thus, there remains a need for a method for large-scale production of lentiviral vectors with high titer and a large-scale purification process and formulation buffers that preserve vector stability.

### SUMMARY

[0005] The disclosure provides, at least in part, to a method for producing high titer lentiviral vectors, carrying a transgene of interest under satisfactory safety conditions. The disclosure also provides at least in part, methods of purification of such lentiviral particles, e.g., from a cell culture. The disclosure also provides a formulation for lentiviral preparations that maintain structural integrity of the viral vector during purification, storage, and gene transfer events, e.g., ex vivo gene transfer.

[0006] In some aspects, the present disclosure provides a method for manufacturing a lentiviral vector, the method comprising:
[0007] a) providing a plurality of mammalian (e.g., human) cells,
[0008] b) contacting the plurality of mammalian cells with:
   [0009] i) FectoVIR®-AAV transfection reagent, and
   [0010] ii) nucleic acid encoding a therapeutic effector, e.g., a therapeutic protein (e.g., a CAR) and sufficient LTR sequence for packaging into a viral particle, and optionally nucleic acid encoding a lentiviral packaging protein, a lentiviral envelope protein, and,
[0011] under conditions that allow the nucleic acid to be introduced into at least a subset of the cells; and
[0012] c) culturing the cell under conditions suitable for production of the lentiviral vector.

[0013] In certain embodiments, when the plurality of mammalian cells is in a 50 L culture yields a number of transducing units per ml culture that is no less than 50%, 60%, 70%, or 80% the number of transducing units per ml culture in an otherwise similar 100 ml culture.

[0014] In certain embodiments, the method yields at least 1×10⁷ or 3×10⁷ or at least 1×10⁸ transducing units when used under conditions described in Example 5.

[0015] In certain embodiments, the method yields a ratio of equal to or less than 1188:1, 953:1, and 1800:1 PP (physical particles): IP (infectious particles).

[0016] In certain embodiments, the mammalian cells are 293 cells, e.g., Expi293F cells.

[0017] In certain embodiments, the FectoVIR®-AAV is used at a concentration of 0.3-0.6 μl FectoVIR®-AAV/million cells, e.g., about 0.4 μl/million cells.

[0018] In certain embodiments, the nucleic acid is used at a concentration of 0.3-0.6 μg of nucleic acid/million cells, e.g., about 0.4 μg/million cells.

[0019] In certain embodiments, the ratio of FectoVIR®-AAV: DNA for transfection 1:0.5 to 1:2, e.g., about 1:1 (wherein optionally the DNA for transfection comprises DNA encoding the therapeutic effector, DNA encoding one or more retroviral packaging protein and DNA encoding a retroviral envelope protein).

[0020] In certain embodiments, the FectoVIR®-AAV transfection reagent is complexed with the nucleic acid.

[0021] In some embodiments, the method further comprises admixing the FectoVIR®-AAV transfection reagent with the nucleic acid before step b).

[0022] In certain embodiments, complexation volume of the transfection reagent and the nucleic acid is between about 1% and about 15%, e.g., about 1% and about 10% (e.g., about 5-7.5% or 7.5-10%).

[0023] In some embodiments, the complexation volume is 3-7%, 4-6%, or about 5%.

[0024] In certain embodiments, the FectoVIR®-AAV transfection reagent and the nucleic acid are incubated for sufficient time to allow complexation to occur, e.g., about 10-90 minutes, e.g., 15-60, e.g., 15-30, 30-45, or 45-60 minutes.

[0025] In some aspects, the present disclosure provides a method of manufacturing a lentiviral vector, the method comprising:
[0026] a) culturing a plurality of mammalian (e.g., human) cells at a pH of above about 6.9 or about 6.9-7.3, e.g., about 7.0-7.1;
[0027] b) subsequently to step a), adjusting the pH of the culture to about 6.0-6.8, e.g., 6.6-6.8, e.g., about 6.7;
[0028] c) subsequently to step b), contacting the culture with a transfection reagent and DNA.

[0029] In certain embodiments, the transfection reagent comprises FectoVIR®-AAV transfection reagent.

[0030] In some embodiments, the DNA encodes one or more retroviral packaging protein, a retroviral envelope protein, and a therapeutic effector, e.g., a therapeutic protein (e.g., a CAR).

[0031] In some embodiments, a) comprises culturing the cells for about 2-4 days, e.g., about 3 days.

[0032] In certain embodiments, the method further comprises an additional step of culturing the cells between steps b) and c).

[0033] In some embodiments, the method further comprises an additional step of culturing the cells after step c).

[0034] In some embodiments, step b) comprises lowering the pH by about 0.1, 0.2, 0.3, 0.4, 0.5, 0.6, 0.7, 0.8, 0.9, or 1.

[0035] In certain embodiments, prior to step a), the plurality of mammalian cells are inoculated at between 0.1×10⁶ cells/mL—and 0.3×10⁶ cells/mL (e.g., about 0.15×10⁶ cells/mL or about 0.2×10⁶ cells/mL) in culture medium (e.g., FreeStyle™ medium) at a final volume.

[0036] In some embodiments, the plurality of mammalian cells are inoculated between 50 and 80 hours (e.g., about 55 hours, about 60 hours, about 65 hours, about 70 hours, about 72 hours, about 75 hours, or about 80 hours) prior to step a).

[0037] In certain embodiments, the plurality of mammalian cells are cultured under conditions suitable to allow for cell growth and amplification to a suitable cell density at transfection (e.g., between about 1.0×10⁶ cells/mL and about 3.0×10⁶ cells/mL (e.g., between 1.5×10⁶ cells/mL and 2.5×10⁶ cells/mL).

[0038] In some aspects, the present disclosure provides a method of manufacturing a lentiviral vector, the method comprising:
[0039] a) providing a composition comprising the lentiviral vector and at least one impurity (e.g., wherein the composition comprises a clarified cell harvest or a filtrate), and
[0040] b) contacting the composition with arginine or a salt thereof.

[0041] In certain embodiments, one or more of:
[0042] i) the arginine is at a concentration of about 25-50 mM (about 50 mM), 50-100 mM (e.g., about 75 mM), 100-200 mM (e.g., about 150 mM), or 200-400 (e.g., about 300) mM arginine); or
[0043] ii) the arginine is at a concentration sufficient to increase level of transducing units of the lentiviral vector by about 10%-300%, 20%-180%, 30%-160%, 50%-150%, 75%-125% or about 100% compared to an otherwise similar composition, e.g., in an assay according to Example 7;
[0044] iii) after step b) the composition shows a total particle concentration per ml of less than 400,000, 300,000, 200,000, or 100,000, as measured by micro-flow imaging, e.g., in an assay described in Example 10, wherein optionally the particles comprise aggregated lentivirus;
[0045] iv) after step b) the composition shows a concentration of particles that are ≥10 μm per ml of less than about 5,000, 4,500, 4,000, 3,500, 3,000, or 2,500, as measured by micro-flow imaging, e.g., in an assay described in Example 10 wherein optionally the particles comprise aggregated lentivirus;
[0046] v) after step b) the composition shows a concentration of particles that are ≥25 μm per ml of less than about 500, 400, 300, or 200, as measured by micro-flow imaging, e.g., in an assay described in Example 10 wherein optionally the particles comprise aggregated lentivirus;
[0047] vi) after step b), the composition shows reduced aggregation of the lentiviral vector compared to an otherwise similar filtrate without addition of the arginine or salt thereof;
[0048] vii) recovery of transducing units of the lentiviral vector is greater than an otherwise similar control without arginine added, e.g., by at least about 10%, 20%, 50%, 100%, or 200%, e.g., as measured in an assay according to Example 7.

[0049] In some embodiments, b) comprises contacting the composition with a solution comprising the arginine and a buffer, wherein optionally the buffer is PIPES, wherein optionally the PIPES is at a concentration of from about 10 mM to about 50 mM, e.g., about of 20 mM in the solution. In certain embodiments, the solution has a pH of about 6.0 to about 7.0, e.g., about 6.5.

[0050] In some embodiments, the solution further comprises a salt, wherein optionally the salt is selected from the group consisting of sodium chloride, magnesium chloride, and calcium chloride, e.g., sodium chloride.

[0051] In some embodiments, the salt is present in the solution at a concentration of from about 25-150 mM, e.g., 50-100 mM, e.g., about 75 mM.

[0052] In certain embodiments, the concentration of the salt in the solution has a pH of about 6.5.

[0053] In some embodiments, the solution further comprises a carbohydrate, e.g., a non-reducing carbohydrate, e.g., sucrose or trehalose.

[0054] In certain embodiments, the carbohydrate is present in the solution at a concentration of from about 1% to about 10% by weight per volume of said solution, e.g., about 2% to about 5% by weight per volume of the solution, about 2.5% by weight per volume of the solution.

[0055] In certain embodiments, the carbohydrate is present in the solution at a concentration of about 30-150 mM (about 73 mM), or 150-300 (e.g., about 220) mM.

[0056] In some embodiments, the solution further comprises one or both of NaCl (e.g., about 25-150 mM, e.g., 50-100 mM, e.g., about 75 mM), and sucrose (e.g., about 30-150 mM, e.g., about 73 mM, or e.g., about 150-300 mM, e.g., about 220 mM, or about 2.5% by weight per volume) of the solution.

[0057] In some embodiments, the solution comprises 20 mM PIPES, 75 mM sodium chloride, and 2.5% sucrose by weight per volume of the solution, and wherein the solution has a pH of about 6.5. In certain embodiments, the solution comprises about 20 mM PIPES, about 75 mM sodium chloride, and about 2.5% sucrose by weight per volume of the solution, and wherein the solution has a pH of about 6.5.

[0058] In certain embodiments, the solution comprises 20 mM PIPES, 75 mM sodium chloride, and 73 mM sucrose and wherein the solution has a pH of about 6.5. In certain embodiments, the solution comprises about 20 mM PIPES, about 75 mM sodium chloride, and about 73 mM sucrose and wherein the solution has a pH of about 6.5.

[0059] In some embodiments, the solution comprises 20 mM PIPES, 75 mM sodium chloride, and 220 mM sucrose and wherein the solution has a pH of about 6.5. In some embodiments, the solution comprises about 20 mM PIPES, about 75 mM sodium chloride, and about 220 mM sucrose and wherein the solution has a pH of about 6.5.

[0060] In some embodiments, the solution further comprises 20 mM PIPES, 75 mM arginine, e.g., arginine-HCl, and wherein the solution has a pH of about 6.5. In some embodiments, the solution further comprises about 20 mM PIPES, about 75 mM arginine, e.g., arginine-HCl, and wherein the solution has a pH of about 6.5.

[0061] In some embodiments, the osmolality of said solution is from about 270 mOsm/kg to about 330 mOsm/kg, e.g., about 275 mOsm/kg to about 300 mOsm/k, e.g., about 285 mOsm/kg.

[0062] In certain embodiments, the method further comprises: c) performing a purification step, e.g., a filtration step, on the composition of b), thereby producing a semi-purified composition comprising the lentiviral vector.

[0063] In certain embodiments, the method further comprises, after step c), contacting the semi-purified composition with arginine or a salt thereof.

[0064] In some embodiments, the arginine encapsulates the lentiviral vector.

[0065] In certain embodiments, the arginine stabilizes the lentiviral vector.

[0066] In some embodiments, the impurity comprises a protein (e.g., a host cell protein), a nucleic acid (e.g., a host cell nucleic acid), a carbohydrate (e.g., a host cell carbohydrate), a lipid, an enzyme, a salt, a buffer, or any combination thereof.

[0067] In certain embodiments, the cell density at transfection is between about 1.0×10⁶ cells/mL and about 3.0×10⁶ cells/mL (e.g., between 1.5×10⁶ cells/mL and 2.5×10⁶ cells/mL).

[0068] In some embodiments, the viability of the cells is, or is assessed to be, at least 90% (e.g., 91%, 92%, 93%, 94%, 95%, 96%, 97%, 98%, 99%, or 100%) at the time of transfection.

[0069] In certain embodiments, the viability of the cells is measured at or around the time of transfection (e.g., within 30 minutes prior to transfection).

[0070] In some embodiments, the method is used for a process with two or more nucleic acids (e.g., two or more plasmids, e.g., two plasmids, three plasmids, four plasmids, or five plasmids).

[0071] In some aspects, the present disclosure provides a method of manufacturing a lentiviral vector, the method comprising:
[0072] a) providing a population of human cells (e.g., 293 cells);
[0073] b) introducing into the cells nucleic acid encoding a retroviral packaging protein, a retroviral envelope protein, and a therapeutic effector, e.g., a therapeutic protein (e.g., a CAR),
[0074] c) contacting the cells with benzonase at a time about 6-40, 10-40, 10-30, or about 20 hours after step b); and
[0075] d) culturing the cells under conditions suitable for production of the lentiviral vector.

[0076] In some aspects, the present disclosure provides a method of manufacturing a lentiviral vector, the method comprising:
[0077] a) providing a population of human cells (e.g., 293 cells);
[0078] b) introducing into the cells nucleic acid encoding a retroviral packaging protein, a retroviral envelope protein, and a therapeutic effector, e.g., a therapeutic protein (e.g., a CAR),
[0079] c) contacting the cells with benzonase;
[0080] d) culturing the cells under conditions suitable for production of the lentiviral vector;
[0081] e) harvesting the lentiviral vectors from cells 6-10 hours, 10-20 hours, 20-30 hours, 30-40 hours, or 40-50 hours after step c).

[0082] In some aspects, the present disclosure provides a method of manufacturing a lentiviral vector, the method comprising:
[0083] a) providing a plurality of mammalian (e.g., human) cells, wherein the plurality of cells (e.g., wherein the cell is a fibroblast cell, e.g., an embryonic kidney fibroblast cell, e.g., an Expi293F cell), wherein the cell comprises a nucleic acid (e.g., DNA) encoding one or more retroviral packaging protein, a retroviral envelope protein, and a therapeutic effector, e.g., a therapeutic protein (e.g., a CAR),
[0084] b) culturing the cell under conditions suitable for production of the lentiviral vector.

[0085] In some aspects, the present disclosure provides, an aqueous composition comprising a lentiviral vector, arginine, a 1,4-piperazinediethanesulfonic acid (PIPES) buffer, and a salt.

[0086] In certain embodiments, the arginine in the aqueous composition is at a concentration of about 25-50 mM (about 50 mM), 50-100 mM (e.g., about 75 mM), 100-200 mM (e.g., about 150 mM), or 200-400 (e.g., about 300) mM arginine), wherein optionally the PIPES aqueous composition is at a concentration of from about 10 mM to about 50 mM, e.g., about, e.g., 20 mM.

[0087] In some embodiments, the aqueous composition has a pH of about 6.0 to about 7.0, e.g., about 6.5.

[0088] In certain embodiments, the aqueous composition further comprises a salt, wherein optionally the salt is selected from the group consisting of sodium chloride, magnesium chloride, and calcium chloride.

[0089] In some embodiments, the salt is sodium chloride (NaCl).

[0090] In certain embodiments, the salt in the aqueous composition is from about 25 mM to about 150 mM, e.g., about 50 mM to about 75 mM.

[0091] In some embodiments, the aqueous composition comprises 20 mM PIPES and 75 mM sodium chloride, and wherein the aqueous composition has a pH of about 6.5.

[0092] In certain embodiments, the aqueous composition further comprises a carbohydrate, e.g., a non-reducing carbohydrate, e.g., sucrose or trehalose.

[0093] In some embodiments, the carbohydrate is present in the aqueous composition at a concentration of from about 1% to about 10% by weight per volume of said solution, e.g., about 2% to about 5% by weight per volume of the aqueous composition, about 2.5% by weight per volume of the aqueous composition.

[0094] In one embodiment, the carbohydrate is present in the aqueous composition at a concentration of from about 30-150 mM (about 73 mM), or 150-300 (e.g., about 220) mM.

[0095] In some embodiments, the aqueous composition comprises one or both of NaCl (e.g., about 25-150 mM, e.g., 50-100 mM, e.g., about 75 mM), and sucrose (e.g., about 30-150 mM, e.g., about 73 mM, or e.g., about 150-300 mM, e.g., about 220 mM, or about 2.5% by weight per volume) of the aqueous composition.

[0096] In one embodiment, the aqueous composition comprises 20 mM PIPES, 75 mM sodium chloride, and 2.5% sucrose by weight per volume of the aqueous composition and wherein the aqueous composition has a pH of about 6.5.

[0097] In certain embodiments, the aqueous composition comprises 20 mM PIPES, 75 mM sodium chloride and 73 mM sucrose and wherein the aqueous composition has a pH of about 6.5.

[0098] In one embodiment, the aqueous composition comprises 20 mM PIPES, 75 mM sodium chloride and 220 mM sucrose and wherein the aqueous composition has a pH of about 6.5.

[0099] In certain embodiments, the osmolality of said aqueous composition is from about 270 mOsm/kg to about 330 mOsm/kg, e.g., about 275 mOsm/kg to about 300 mOsm/k, e.g., about 285 mOsm/kg.

[0100] In one embodiment, the lentiviral vector of any preceding claims is present at a concentration of from about 3×10⁸ TU/mL to about 5×10⁸ TU/mL.

[0101] In certain embodiments, the aqueous composition is free of one or more proteins selected from the group consisting of human serum albumin (HSA), recombinant human serum albumin (rHSA), bovine serum albumin (BSA), and a lipoprotein.

[0102] In one embodiment, lentiviral vector comprises a transgene, e.g., a transgene encoding a protein, e.g., a protein comprising a chimeric antigen receptor (CAR).

[0103] In certain embodiments, said CAR comprises, in an N-terminal to C-terminal direction, an antigen binding domain, a transmembrane domain, and one or more signaling domains.

[0104] In some embodiments, said signaling domain comprises one or more primary signaling domains and/or one or more costimulatory signaling domains.

[0105] In certain embodiments, one of said one or more primary signaling domains comprises a CD3-zeta stimulatory domain.

[0106] In some embodiments, one or more of said costimulatory signaling domains comprises an intracellular domain selected from a costimulatory protein selected from the group consisting of OX40, CD27, CD28, CDS, ICAM-1, LFA-1 (CD11a/CD18), ICOS(CD278), 4-1BB (CD137), CDS, ICAM-1, GITR, BAFFR, HVEM (LIGHTR), SLAMF7, NKp80 (KLRF1), NKp44, NKp30, NKp46, CD160, CD19, CD4, CD8alpha, CD8beta, IL2R beta, IL2R gamma, IL7R alpha, ITGA4, VLA1, CD49a, ITGA4, IA4, CD49D, ITGA6, VLA-6, CD49f, ITGAD, CDIId, ITGAE, CD103, ITGAL, CD11a, LFA-1, ITGAM, CD11b, ITGAX, CD11c, ITGB1, CD29, ITGB2, CD18, LFA-1, ITGB7, NKG2D, NKG2C, TNFR2, TRANCE/RANKL, DNAM1 (CD226), SLAMF4 (CD244, 2B4), CD84, CD96 (Tactile), CEACAM1, CRTAM, Ly9 (CD229), CD160 (BY55), PSGL1, CD100 (SEMA4D), CD69, SLAMF6 (NTB-A, Ly108), SLAM (SLAMF1, CD150, IPO-3), BLAME (SLAMF8), SELPLG (CD162), LTBR, LAT, GADS, SLP-76, PAG/Cbp, CD19a, and a ligand that specifically binds with CD83, e.g., a 4-1 BB (CD137) costimulatory domain or a CD28 costimulatory domain.

[0107] In some embodiments, one or more of said costimulatory signaling domains comprises an intracellular domain selected from a costimulatory protein selected from the group consisting ofCD27, CD28, 4-1BB (CD137), OX40, CD30, CD40, PD-1, ICOS, lymphocyte function-associated antigen-1 (LFA-1), CD2, CD7, LIGHT, NKG2C, B7-H3, a ligand that specifically binds with CD83, CDS, ICAM-1, GITR, BAFFR, HVEM (LIGHTR), SLAMF7, NKp80 (KLRF1), CD160, CD19, CD4, CD8alpha, CD8beta, IL2R beta, IL2R gamma, IL7R alpha, ITGA4, VLA1, CD49a, ITGA4, IA4, CD49D, ITGA6, VLA-6, CD49f, ITGAD, CD11d, ITGAE, CD103, ITGAL, CD11a, LFA-1, ITGAM, CD11b, ITGAX, CDIIc, ITGB1, CD29, ITGB2, CD18, LFA-1, ITGB7, TNFR2, TRANCE/RANKL, DNAM1 (CD226), SLAMF4 (CD244, 2B4), CD84, CD96 (Tactile), CEACAM1, CRTAM, Ly9 (CD229), CD160 (BY55), PSGL1, CD100 (SEMA4D), CD69, SLAMF6 (NTB-A, Ly108), SLAM (SLAMF1, CD150, IPO-3), BLAME (SLAMF8), SELPLG (CD162), LTBR, LAT, GADS, SLP-76, PAG/Cbp, NKp44, NKp30, NKp46, or NKG2D.

[0108] In certain embodiments, said antigen binding domain is an scFv.

[0109] In some embodiments, said antigen binding domain binds to an antigen selected from the group consisting of CD19; CD123; CD22; CD30; CD171; CS-1; C-type lectin-like molecule-1, CD33; epidermal growth factor receptor variant III (EGFRvlll); ganglioside G2 (GD2); ganglioside GD3; TNF receptor family member B cell maturation (BCMA); Tn antigen ((Tn Ag) or (GalNAca-Ser/Thr)); prostate-specific membrane antigen (PSMA); Receptor tyrosine kinase-like orphan receptor 1 (ROR1); Fms-Like Tyrosine Kinase 3 (FLT3); Tumor-associated glycoprotein 72 (TAG72); CD38; CD44v6; Carcinoembryonic antigen (CEA); Epithelial cell adhesion molecule (EPCAM); B7H3 (CD276); KIT (CD1 17); lnterleukin-13 receptor subunit alpha-2; mesothelin; Interleukin 1 1 receptor alpha (IL-1 1 Ra); prostate stem cell antigen (PSCA); Protease Serine 21; vascular endothelial growth factor receptor 2 (VEGFR2); Lewis(Y) antigen; CD24; Platelet-derived growth factor receptor beta (PDGFR-beta); Stage-specific embryonic antigen-4 (SSEA-4); CD20; Folate receptor alpha; Receptor tyrosine-protein kinase ERBB2 (Her2/neu); Mucin 1, cell surface associated (MUC1); epidermal growth factor receptor (EGFR); neural cell adhesion molecule (NCAM); Prostase; prostatic acid phosphatase (PAP); elongation factor 2 mutated (ELF2M); Ephrin B2; fibroblast activation protein alpha (FAP); insulin-like growth factor 1 receptor (IGF-I receptor), carbonic anhydrase IX (CAIX); Proteasome (Prosome, Macropain) Subunit, Beta Type, 9 (LMP2); glycoprotein 100 (gp100); oncogene fusion protein consisting of breakpoint cluster region (BCR) and Abelson murine leukemia viral oncogene homolog 1 (Abl) (bcr-abl); tyrosinase; ephrin type-A receptor 2 (EphA2); Fucosyl GM1; sialyl Lewis adhesion molecule (sLe); ganglioside GM3; transglutaminase 5 (TGS5); high molecular weight-melanoma-associated antigen (HMWMAA); o-acetyl-GD2 ganglioside (OAcGD2); Folate receptor beta; tumor endothelial marker 1 (TEM1/CD248); tumor endothelial marker 7-related (TEM7R); claudin 6 (CLDN6); thyroid stimulating hormone receptor (TSHR); G protein-coupled receptor class C group 5, member D (GPRC5D); chromosome X open reading frame 61 (CXORF61); CD97; CD179a; anaplastic lymphoma kinase (ALK); Polysialic acid; placenta-specific 1 (PLAC1); hexasaccharide portion of globoH glycoceramide (GloboH); mammary gland differentiation antigen (NY-BR-1); uroplakin 2 (UPK2); Hepatitis A virus cellular receptor 1 (HAVCR1); adrenoceptor beta 3 (ADRB3); pannexin 3 (PANX3); G protein-coupled receptor 20 (GPR20); lymphocyte antigen 6 complex, locus K 9 (LY6K); Olfactory receptor 51 E2 (OR51 E2); TCR Gamma Alternate Reading Frame Protein (TARP); Wilms tumor protein (WT1); Cancer/testis antigen 1 (NY-ESO-1); Cancer/testis antigen 2 (LAGE-1 a); Melanoma-associated antigen 1 (MAGE-A1); ETS translocation-variant gene 6, located on chromosome 12p (ETV6-AML); sperm protein 17 (SPA17); X Antigen Family, Member 1 A (XAGE1); angiopoietin-binding cell surface receptor 2 (Tie 2); melanoma cancer testis antigen-1 (MAD-CT-1); melanoma cancer testis antigen-2 (MAD-CT-2); Fos-related antigen 1; tumor protein p53 (p53); p53 mutant; prostein; surviving; telomerase; prostate carcinoma tumor antigen-1, melanoma antigen recognized by T cells 1; Rat sarcoma (Ras) mutant; human Telomerase reverse transcriptase (hTERT); sarcoma translocation breakpoints; melanoma inhibitor of apoptosis (ML-IAP); ERG (transmembrane protease, serine 2 (TMPRSS2) ETS fusion gene); N-Acetyl glucosaminyl-transferase V (NA17); paired box protein Pax-3 (PAX3); Androgen receptor; Cyclin B1; v-myc avian myelocytomatosis viral oncogene neuroblastoma derived homolog (MYCN); Ras Homolog Family Member C (RhoC); Tyrosinase-related protein 2 (TRP-2); Cytochrome P450 1 B1 (CYP1 B1); CCCTC-Binding Factor (Zinc Finger Protein)-Like, Squamous Cell Carcinoma Antigen Recognized By T Cells 3 (SART3); Paired box protein Pax-5 (PAX5); proacrosin binding protein sp32 (OY-TES1); lymphocyte-specific protein tyrosine kinase (LCK); A kinase anchor protein 4 (AKAP-4); synovial sarcoma, X breakpoint 2 (SSX2); Receptor for Advanced Glycation Endproducts (RAGE-1); renal ubiquitous 1 (RU1); renal ubiquitous 2 (RU2); legumain; human papilloma virus E6 (HPV E6); human papilloma virus E7 (HPV E7); intestinal carboxyl esterase; heat shock protein 70-2 mutated (mut hsp70-2); CD79a; CD79b; CD72; Leukocyte-associated immunoglobulin-like receptor 1 (LAIR1); Fc fragment of IgA receptor (FCAR or CD89); Leukocyte immunoglobulin-like receptor subfamily A member 2 (LILRA2); CD300 molecule-like family member f (CD300LF); C-type lectin domain family 12 member A (CLEC12A); bone marrow stromal cell antigen 2 (BST2); EGF-like module-containing mucin-like hormone receptor-like 2 (EMR2); lymphocyte antigen 75 (LY75); Glypican-3 (GPC3); Fc receptor-like 5 (FCRL5); and immunoglobulin lambda-like polypeptide 1 (IGLL1), e.g., to CD19, CD22, mesothelin, or CD123.

[0110] In certain embodiments, said CAR comprises an anti-CD19 antibody or a fragment thereof, a 4-1 BB (CD137) transmembrane domain, and a CD3-zeta signaling domain.

[0111] In some embodiments, the lentiviral vector comprises a second transgene, e.g., a second transgene encoding a second protein, e.g., a second protein comprising a second chimeric antigen receptor (CAR).

[0112] In one aspect, the present disclosure provides a method of manufacturing a lentiviral vector, comprising:
[0113] a) providing a population of human cells (e.g., 293 cells);
[0114] b) introducing into the cells nucleic acid encoding a retroviral packaging protein, a retroviral envelope protein, and a therapeutic effector, e.g., a therapeutic protein (e.g., a CAR),
[0115] c) contacting the cells with benzonase at a time about 2-6 (e.g., about 3), 4-10 (e.g., about 6), 6-40, 10-40, 10-30 (e.g., about 24), or about 20 hours after step b); and
[0116] d) culturing the cells under conditions suitable for production of the lentiviral vector.

[0117] In certain embodiments, Benzonase is added 6-10 hours, 10-20 hours, 20-30 hours, 30-40 hours, or 40-50 hours, before harvest of lentiviral vector from the cells.

[0118] In one aspect, the present disclosure provides a method of manufacturing a lentiviral vector, comprising:
[0119] a) providing a population of human cells (e.g., 293 cells);
[0120] b) introducing into the cells nucleic acid encoding a retroviral packaging protein, a retroviral envelope protein, and a therapeutic effector, e.g., a therapeutic protein (e.g., a CAR),
[0121] c) contacting the cells with benzonase (e.g., 3-24 hours after step b);
[0122] d) culturing the cells under conditions suitable for production of the lentiviral vector;
[0123] e) harvesting the lentiviral vectors from cells 6-10 hours, 10-20 hours, 20-30 hours, 30-40 hours, or 40-50 hours after step c).

[0124] In some embodiments, benzonase is at a concentration of about 10-40 U/mL, e.g., 20-30 U/mL, e.g., about 25 U/mL.

[0125] In certain embodiments, benzonase is at a concentration of about 3-60 U/mL, 3-10 U/mL, 3-7 U/mL, 4-6 U/mL, or about 5 U/mL.

[0126] In one embodiment, the benzonase is at a concentration of 5-50, 5-15, 15-25, or 25-50 U/mL.

[0127] In certain embodiments, the method further comprises, before step c), contacting the benzonase with MgCl₂, e.g., at about 1-5 mM, 1-3 mM, or about 2 mM.

[0128] In one aspect, the present disclosure provides a method of manufacturing a lentiviral vector, comprising:
[0129] a) providing a plurality of mammalian (e.g., human) cells, wherein the plurality of mammalian cells do not comprise SV40 large T antigen (e.g., wherein the cell is a fibroblast cell, e.g., an embryonic kidney fibroblast cell, e.g., an Expi293F cell), wherein the plurality of mammalian cells comprise a nucleic acid (e.g., DNA) encoding one or more retroviral packaging protein, a retroviral envelope protein, and a therapeutic effector, e.g., a therapeutic protein (e.g., a CAR),
[0130] b) culturing the cell under conditions suitable for production of the lentiviral vector.

[0131] In certain embodiments, a) comprises introducing the nucleic acid into the plurality of mammalian cells.

[0132] In some embodiments, the method further comprises at least partially separating the lentiviral vector from the plurality of mammalian cells.

[0133] In one embodiment, the one or more retroviral packaging proteins comprises a lentiviral gag, a lentiviral pol, or a lentiviral rev, or any combination thereof.

[0134] In certain embodiments, the retroviral envelope protein comprises a VSV-G.

[0135] In some aspects the present disclosure provides a preparation of lentiviral vector, the preparation comprising:
[0136] a plurality of lentiviral vector that comprise:
[0137] a) a lentivirus genome encoding a therapeutic effector, e.g., a therapeutic protein (e.g., a CAR), and
[0138] b) an envelope enclosing the lentivirus genome (wherein optionally the envelope comprises VSV-G);
[0139] wherein the preparation comprises at least 5×10⁷, 1×10⁸, 1×10⁹, or 1×10¹⁰, transducing units;
[0140] wherein the preparation comprises less than 90% of SV40 large T antigen or less than 10 μg/ml, 1 μg/ml of nucleic acid (e.g., DNA) encoding SV40 large T antigen.

[0141] In some embodiments, the plurality of lentiviral vectors comprises at least 1×10⁹, 2×10⁹, 5×10⁹, or 1×10¹⁰, 2×10¹⁰, 5×10¹⁰, 1×10¹¹, 2×10¹¹, 5×10¹, or 1×10¹² of the cells.

[0142] In certain embodiments, the plurality of mammalian cells are in a culture volume of at least 5, 10, 20, 50, 100, 200, or 500 L.

[0143] In one embodiment, comprises culturing the plurality of mammalian cells in serum-free medium.

[0144] In certain embodiments, the plurality of mammalian cells are grown in suspension.

[0145] In some embodiments, the CAR comprises a CD19 CAR (e.g., a humanized CD19 CAR, e.g., as described in WO2014153270A1.

[0146] In certain embodiments, the CAR comprises a dual CAR (e.g., a humanized CD19-CD22 CAR, e.g., as described in WO2016164731A2.

[0147] In some embodiments, the nucleic acid encoding a CAR further encodes a shRNA, e.g., as described in WO2017049166A.

[0148] In one embodiment, the lentiviral vector is produced in cells cultured in the absence of serum.

[0149] In certain embodiments, the lentiviral vector is characterized by a hydrodynamic radius of 100±25 nm as measured by dynamic light scattering (DLS).

[0150] In certain embodiments, the lentiviral vector maintains said hydrodynamic radius of 100±25 nm within a temperature range of from 25° C. to 55° C. (e.g., 26° C., 27° C., 28° C., 29° C., 30° C., 31° C., 32° C., 33° C., 34° C., 35° C., 36° C., 37° C., 38° C., 39° C., 40° C., 41° C., 42° C., 43° C., 44° C., 45° C., 46° C., 47° C., 48° C., 49° C., 50° C., 51° C., 52° C., 53° C., 54° C., or 55° C.).

[0151] In some embodiments, the lentiviral vector is characterized by a polydispersity of from 10% to 25% (e.g., 10%, 11%, 12%, 13%, 14%, 15%, 16%, 17%, 18%, 19%, 20%, 21%, 22%, 23%, 24% or 25%).

[0152] In one embodiment, the lentiviral vector maintains said polydispersity of from 10% to 25% (e.g., 10%, 11%, 12%, 13%, 14%, 15%, 16%, 17%, 18%, 19%, 20%, 21%, 22%, 23%, 24% or 25%) within a temperature range of from 25° C. to 55° C. (e.g., 26° C., 27° C., 28° C., 29° C., 30° C., 31° C., 32° C., 33° C., 34° C., 35° C., 36° C., 37° C., 38° C., 39° C., 40° C., 41° C., 42° C., 43° C., 44° C., 45° C., 46° C., 47° C., 48° C., 49° C., 50° C., 51° C., 52° C., 53° C., 54° C., or 55° C.).

[0153] In certain embodiments, the lentiviral vector maintains a concentration after 3 freeze/thaw cycles of from about 70% to about 100% (e.g., about 70%, about 75%, about 80%, about 85%, about 90%, about 95%, about 97%, or about 100%) relative to the concentration of said lentiviral vector in said aqueous composition prior to said freeze/thaw cycles, wherein each of said freeze/thaw cycles comprises freezing said aqueous composition and subsequently allowing said aqueous composition to thaw at room temperature.

[0154] In some embodiments, the lentiviral vector maintains said concentration of from about 70% to about 100% (e.g, about 70%, about 75%, about 80%, about 85%, about 90%, about 95%, about 97%, or about 100%) after 6-10 of said freeze/thaw cycles, e.g., after 6-9 of said freeze/thaw cycles.

[0155] In some aspects, the present disclosure provides an aqueous composition comprising a lentiviral vector, a buffer selected from the group consisting of a phosphate buffer, a sodium citrate buffer, a 2-(N-morpholino) ethanesulfonic acid (MES) buffer, a 3-morpholinopropane-1-sulfonic acid (MOPS) buffer, and a salt.

[0156] In some embodiments, said salt is selected from the group consisting of sodium chloride, magnesium chloride, and calcium chloride.

[0157] In one embodiment, said aqueous composition further comprises a non-reducing carbohydrate selected from the group consisting of sucrose and trehalose.

[0158] In some aspects, the present disclosure provides scalable processes for the production of large quantities of viral vectors (e.g., lentiviral vectors), e.g., for prophylactic, diagnostic, immunotherapeutic or therapeutic use. The processes may be performed using suspension cells (e.g., HEK293 cells, e.g., Expi293F cells). In some embodiments, substantially all of the suspension cells do not express a large T antigen, e.g., SV40 T antigen. In some embodiments, the process may be performed using a bioreactor.

[0159] In some aspects, the present disclosure provides highly reproducible efficient scalable processes for the production of large quantities of viral vectors (e.g., lentiviral vectors) having one or both of a high viral titer or high viral yield.

[0160] In some aspect, the present disclosure provides highly reproducible efficient scalable processes for the purification of large quantities of viral vector (e.g., lentiviral) having one or both of a high viral titer or high viral yield.

[0161] In another aspect, the present disclosure provides compositions and methods for stabilizing viral vectors, e.g., lentiviral vectors during a purification process.

### BRIEF DESCRIPTION OF THE FIGURES

[0162] FIG. 1A shows a LV productivity of ˜1.5E7 TU/mL with Expi293F cells and a LV productivity of ˜3.9E7 TU/mL with HEK293T/17 cells, and the PP/IP ratio obtained with Expi293F cells is about 1900, compared to a PP/IP ratio of about 1000 achieved with HEK293T/17 cells.

[0163] FIG. 1B shows the cell densities observed at each passage are comparable between both cell lines (˜3×10⁶ cells/mL).

[0164] FIG. 1C shows both Expi293F and HEK293T/17 cells show high viability in culture (>90%).

[0165] FIG. 2A shows the transfection reagent FectoVIR®-AAV increases significantly the LV productivity of Expi293F cells, from 1.9-fold to 2.8-fold depending on the gene of interest.

[0166] FIG. 2B shows a consistent and robust increase in LV productivity of Expi293F cells when FectoVIR®-AAV is used as transfection reagent in different culture volumes.

[0167] FIG. 3 shows the amount of lentivirus obtained using different amount of DNA for transfection. The highest viral production and lowest PP/IP in this experiment was obtained with 0.4 μg DNA/1E6 cells.

[0168] FIG. 4 shows the amount of lentivirus obtained with two different lentiviral vectors, where a ˜3-fold increase in productivity was induced by the shift of pH to 6.7 before transfection. A 2.5 L scale bioreactor was used.

[0169] FIG. 5 shows the comparative lentiviral productivity using different CAR constructs in two production systems: (i) Expi293F cells using FectoVIR®-AAV as a transfection reagent and (ii) HEK293T cells using PEIpro® as a transfection reagent.

[0170] FIG. 6 shows that, in the presence of arginine, the filtration process time was reduced from 244 min to 145 min compared to the control run when samples were subjected to ultrafiltration.

[0171] FIG. 7 shows the addition of arginine prior to TFF improved the vector recovery of the subsequent process from about 40% to over 80%.

[0172] FIG. 8 shows the vector recovery increased further when arginine spike was implemented prior to both filtration steps.

[0173] FIG. 9 shows addition of arginine reduces the particle count and size in a concentration dependent manner.

[0174] FIG. 10 is a bar graph showing productivity of infectious LVV (TU/mL—TU assay) and ratio PP/IP (Physical Particles/Infectious Particles) at harvest with different concentrations of benzonase and different times of addition.

[0175] FIG. 11 is a bar graph showing quantity of DNA (ng/1E+7 TU) at harvest with different concentrations of benzonase and different times of addition.

[0176] FIG. 12 is a bar graph showing quantity of DNA (ng/mL) at harvest with different concentrations of benzonase and different times of addition.

[0177] FIG. 13 is a bar graph showing productivity of infectious LVV (TU/mL—TU assay) and ratio PP/IP (Physical Particles/Infectious Particles) at harvest with different incubation times and complexation volumes.

[0178] FIG. 14 is a bar graph showing productivity of infectious LVV (TU/mL—TU assay) and ratio PP/IP (Physical Particles/Infectious Particles) at harvest with different incubation times.

[0179] FIG. 15 is a bar graph showing cell density and viability at 50 L scale (n=4) during the LVV process.

[0180] FIG. 16 is a bar graph showing productivity of infectious LVV (TU/mL—TU assay) at different scales with 2 different products (C1 and I1).

### DETAILED DESCRIPTION

[0181] This disclosure is based, at least in part, on a method for producing high titer lentiviral vectors, carrying a transgene of interest and under satisfactory safety conditions. The disclosure also provides at least in part, methods of purification of such lentiviral particle, e.g., from a cell culture. The disclosure also provides a formulation to lentiviral preparations that maintain structural integrity of the viral vector during purification, storage, and gene transfer events ex vivo.

### Definitions

[0182] Unless stated otherwise, the following terms and phrases as used herein are intended to have the following meanings.

[0183] As used herein, the singular form “a” or “an” includes plural references unless indicated otherwise.

[0184] The term “or” is used herein to mean, and is used interchangeably with, the term “and/or” unless context clearly indicates otherwise.

[0185] “About” and “approximately” shall generally mean an acceptable degree of error for the quantity measured given the nature or precision of the measurements. Exemplary degrees of error are within 20 percent (%), typically, within 10%, and more typically, within 5% of a given value or range of values.

[0186] The term “amino acid” refers to naturally occurring, synthetic, and unnatural amino acids, as well as amino acid analogs and amino acid mimetics that function in a manner similar to the naturally occurring amino acids. Naturally occurring amino acids are those encoded by the genetic code, as well as those amino acids that are later modified, e.g., hydroxyproline, γ-carboxyglutamate, and O-phosphoserine. Amino acid analogs refer to compounds that have the same basic chemical structure as a naturally occurring amino acid, i.e., an α-carbon that is bound to a hydrogen, a carboxyl group, an amino group, and an R group, e.g., homoserine, norleucine, methionine sulfoxide, methionine methyl sulfonium. Such analogs have modified R groups (e.g., norleucine) or modified peptide backbones, but retain the same basic chemical structure as a naturally occurring amino acid. Amino acid mimetics refers to chemical compounds that have a structure that is different from the general chemical structure of an amino acid, but that functions in a manner similar to a naturally occurring amino acid.

[0187] As used herein, the term “buffer” refers to a mixture of a weak acid and its conjugate base or a weak base and its conjugate acid. For instance, as used herein, a “1,4-piperazinediethanesulfonic acid buffer” refers to a mixture that includes 1,4-piperazinediethanesulfonic acid and the 1,4-piperazinediethanesulfonate anion (e.g., sodium 1,4-piperazinediethanesulfonate). Likewise, a “sodium citrate buffer” as used herein refers to a mixture that includes sodium citrate, as well as its conjugate acid, citric acid. Due to the chemical equilibrium that is established between a weak acid and its conjugate base, a solution containing a buffer resists abrupt changes in pH upon the addition of small quantities of acid or base to the solution.

[0188] As used herein, the term “binding domain” or “antibody molecule” refers to a protein, e.g., an immunoglobulin chain or fragment thereof, comprising at least one immunoglobulin variable domain sequence. The term “binding domain” or “antibody molecule” encompasses antibodies and antibody fragments. In some embodiments, an antibody molecule is a multispecific antibody molecule, e.g., it comprises a plurality of immunoglobulin variable domain sequences, wherein a first immunoglobulin variable domain sequence of the plurality has binding specificity for a first epitope and a second immunoglobulin variable domain sequence of the plurality has binding specificity for a second epitope. In some embodiments, a multispecific antibody molecule is a bispecific antibody molecule. A bispecific antibody has specificity for no more than two antigens. A bispecific antibody molecule is characterized by a first immunoglobulin variable domain sequence which has binding specificity for a first epitope and a second immunoglobulin variable domain sequence that has binding specificity for a second epitope.

[0189] The term “antibody heavy chain,” refers to the larger of the two types of polypeptide chains present in antibody molecules in their naturally occurring conformations, and which normally determines the class to which the antibody belongs.

[0190] The term “antibody light chain,” refers to the smaller of the two types of polypeptide chains present in antibody molecules in their naturally occurring conformations. Kappa (κ) and lambda (λ) light chains refer to the two major antibody light chain isotypes.

[0191] The term “antigen binding fragment”, as used herein, refers to one or more portions of an antibody that retain the ability to specifically interact with (e.g., by binding, steric hindrance, stabilizing/destabilizing, spatial distribution) an epitope of an antigen. Examples of binding fragments include, but are not limited to, single-chain Fvs (scFv), camelid antibodies, disulfide-linked Fvs (sdFv), Fab fragments, F(ab′) fragments, a monovalent fragment consisting of the VL, VH, CL and CH1 domains; a F(ab)2 fragment, a bivalent fragment comprising two Fab fragments linked by a disulfide bridge at the hinge region; a Fd fragment consisting of the VH and CH1 domains; a Fv fragment consisting of the VL and VH domains of a single arm of an antibody; a dAb fragment (Ward et al., Nature 341:544-546, 1989), which consists of a VH domain; and an isolated complementarity determining region (CDR), or other epitope-binding fragments of an antibody.

[0192] The portion of the CAR described comprising an antibody or antibody fragment thereof may exist in a variety of forms where the antigen binding domain is expressed as part of a contiguous polypeptide chain including, for example, a single domain antibody fragment (sdAb), a single chain antibody (scFv), a humanized antibody or bispecific antibody (Harlow et al., 1999, In: Using Antibodies: A Laboratory Manual, Cold Spring Harbor Laboratory Press, NY; Harlow et al., 1989, In: Antibodies: A Laboratory Manual, Cold Spring Harbor, New York; Houston et al., 1988, Proc. Natl. Acad. Sci. USA 85:5879-5883; Bird et al., 1988, Science 242:423-426). In some aspects, the antigen binding domain of a CAR composition comprises an antibody fragment. In a further aspect, the CAR comprises an antibody fragment that comprises a scFv. The precise amino acid sequence boundaries of a given CDR can be determined using any of a number of well-known schemes, including those described by Kabat et al. (1991), “Sequences of Proteins of Immunological Interest,” 5th Ed. Public Health Service, National Institutes of Health, Bethesda, MD (“Kabat” numbering scheme), Al-Lazikani et al., (1997) JMB 273, 927-948 (“Chothia” numbering scheme), or a combination thereof.

[0193] Furthermore, although the two domains of the Fv fragment, VL and VH, are coded for by separate genes, they can be joined, using recombinant methods, by a synthetic linker that enables them to be made as a single protein chain in which the VL and VH regions pair to form monovalent molecules (known as single chain Fv (“scFv”); see, e.g., Bird et al., Science 242:423-426, 1988; and Huston et al., Proc. Natl. Acad. Sci. 85:5879-5883, 1988). Such single chain antibodies are also intended to be encompassed within the term “antigen binding fragment.” These antigen binding fragments are obtained using conventional techniques known to those of skill in the art, and the fragments are screened for utility in the same manner as are intact antibodies.

[0194] The term “Chimeric Antigen Receptor” or alternatively a “CAR” refers to a recombinant polypeptide construct comprising at least an extracellular antigen binding domain, a transmembrane domain and a cytoplasmic signaling domain (also referred to herein as “an intracellular signaling domain”) comprising a functional signaling domain derived from a stimulatory molecule as defined below. In some embodiments, the domains in the CAR polypeptide construct are in the same polypeptide chain, e.g., comprise a chimeric fusion protein. In some embodiments, the domains in the CAR polypeptide construct are not contiguous with each other, e.g., are in different polypeptide chains, e.g., as provided in an RCAR.

[0195] In some aspects, the cytoplasmic signaling domain comprises a primary signaling domain (e.g., a primary signaling domain of CD3-zeta). In some aspects, the cytoplasmic signaling domain further comprises one or more functional signaling domains derived from at least one costimulatory molecule as defined below. In some aspects, the costimulatory molecule is chosen from 41BB (i.e., CD137), CD27, ICOS, and/or CD28. In some aspects, the CAR comprises a chimeric fusion protein comprising an extracellular antigen recognition domain, a transmembrane domain and an intracellular signaling domain comprising a functional signaling domain derived from a stimulatory molecule. In some aspects, the CAR comprises a chimeric fusion protein comprising an extracellular antigen recognition domain, a transmembrane domain and an intracellular signaling domain comprising a functional signaling domain derived from a co-stimulatory molecule and a functional signaling domain derived from a stimulatory molecule. In some aspects, the CAR comprises a chimeric fusion protein comprising an extracellular antigen recognition domain, a transmembrane domain and an intracellular signaling domain comprising two functional signaling domains derived from one or more co-stimulatory molecule(s) and a functional signaling domain derived from a stimulatory molecule. In some aspects, the CAR comprises a chimeric fusion protein comprising an extracellular antigen recognition domain, a transmembrane domain and an intracellular signaling domain comprising at least two functional signaling domains derived from one or more co-stimulatory molecule(s) and a functional signaling domain derived from a stimulatory molecule. In some aspects the CAR comprises an optional leader sequence at the amino-terminus (N-term) of the CAR fusion protein. In some aspects, the CAR further comprises a leader sequence at the N-terminus of the extracellular antigen recognition domain, wherein the leader sequence is optionally cleaved from the antigen recognition domain (e.g., an scFv) during cellular processing and localization of the CAR to the cellular membrane.

[0196] A CAR that comprises an antigen binding domain (e.g., an scFv, a single domain antibody, or TCR (e.g., a TCR alpha binding domain or TCR beta binding domain)) that targets a specific tumor marker X, wherein X can be a tumor marker as described herein, is also referred to as XCAR. For example, a CAR that comprises an antigen binding domain that targets BCMA is referred to as BCMA CAR. The CAR can be expressed in any cell, e.g., an immune effector cell as described herein (e.g., a T cell or an NK cell).

[0197] The term “signaling domain” refers to the functional portion of a protein which acts by transmitting information within the cell to regulate cellular activity via defined signaling pathways by generating second messengers or functioning as effectors by responding to such messengers. The term “stimulatory molecule,” refers to a molecule expressed by an immune cell (e.g., T cell, NK cell, B cell) that provides the cytoplasmic signaling sequence(s) that regulate activation of the immune cell in a stimulatory way for at least some aspect of the immune cell signaling pathway. In some aspects, the signal is a primary signal that is initiated by, for instance, binding of a TCR/CD3 complex with an MHC molecule loaded with peptide, and which leads to mediation of a T cell response, including, but not limited to, proliferation, activation, differentiation, and the like. A primary cytoplasmic signaling sequence (also referred to as a “primary signaling domain”) that acts in a stimulatory manner may contain a signaling motif which is known as immuno-receptor tyrosine-based activation motif or ITAM. Examples of an ITAM containing-cytoplasmic signaling sequence that is of particular use in the invention include, but are not limited to, those derived from CD3 zeta, common FcR gamma (FCER1G), Fc gamma RIIa, FcR beta (Fc Epsilon Rib), CD3 gamma, CD3 delta, CD3 epsilon, CD79a, CD79b, DAP10, and DAP12. In certain CARs, the intracellular signaling domain in any one or more CARs of the invention comprises an intracellular signaling sequence, e.g., a primary signaling sequence of CD3-zeta. In a specific CAR of the invention, the primary signaling sequence of CD3-zeta is a human sequence, or the equivalent residues from a non-human species, e.g., mouse, rodent, monkey, ape and the like.

[0198] An “intracellular signaling domain,” as the term is used herein, refers to an intracellular portion of a molecule. The intracellular signaling domain generates a signal that promotes an immune effector function of the CAR containing cell, e.g., a CART cell. Examples of immune effector function, e.g., in a CART cell, include cytolytic activity and helper activity, including the secretion of cytokines.

[0199] In some embodiments, the intracellular signaling domain can comprise a primary intracellular signaling domain. Exemplary primary intracellular signaling domains include those derived from the molecules responsible for primary stimulation, or antigen dependent simulation. In some embodiments, the intracellular signaling domain can comprise a costimulatory intracellular domain. Exemplary costimulatory intracellular signaling domains include those derived from molecules responsible for costimulatory signals, or antigen independent stimulation. For example, in the case of a CART, a primary intracellular signaling domain can comprise a cytoplasmic sequence of a T cell receptor, and a costimulatory intracellular signaling domain can comprise cytoplasmic sequence from co-receptor or costimulatory molecule.

[0200] A primary intracellular signaling domain can comprise a signaling motif which is known as an immuno-receptor tyrosine-based activation motif or ITAM. Examples of ITAM containing primary cytoplasmic signaling sequences include, but are not limited to, those derived from CD3 zeta, common FcR gamma (FCERIG), Fc gamma RIIa, FcR beta (Fc Epsilon Rib), CD3 gamma, CD3 delta, CD3 epsilon, CD79a, CD79b, DAP10, and DAP12.

[0201] The term “zeta” or alternatively “zeta chain”, “CD3-zeta” or “TCR-zeta” refers to CD247. Swiss-Prot accession number P20963 provides exemplary human CD3 zeta amino acid sequences. A “zeta stimulatory domain” or alternatively a “CD3-zeta stimulatory domain” or a “TCR-zeta stimulatory domain” refers to a stimulatory domain of CD3-zeta or a variant thereof (e.g., a molecule having mutations, e.g., point mutations, fragments, insertions, or deletions). In some embodiments, the cytoplasmic domain of zeta comprises residues 52 through 164 of GenBank Acc. No. BAG36664.1 or a variant thereof (e.g., a molecule having mutations, e.g., point mutations, fragments, insertions, or deletions). Alternatively or in addition, the term “zeta” or alternatively “zeta chain”, “CD3-zeta” (or “CD3zeta, CD3 zeta or CD3z) or “TCR-zeta” is defined as the protein provided as GenBank Acc. No. BAG36664.1, or the equivalent residues from a non-human species, e.g., mouse, rodent, monkey, ape and the like, and a “zeta stimulatory domain” or alternatively a “CD3-zeta stimulatory domain” or a “TCR-zeta stimulatory domain” is defined as the amino acid residues from the cytoplasmic domain of the zeta chain, or functional derivatives thereof, that are sufficient to functionally transmit an initial signal necessary for T cell activation. In some aspects, the cytoplasmic domain of zeta comprises residues 52 through 164 of GenBank Acc. No. BAG36664.1 or the equivalent residues from a non-human species, e.g., mouse, rodent, monkey, ape and the like, that are functional orthologs thereof.

[0202] The term a “costimulatory molecule” refers to a cognate binding partner on a T cell that specifically binds with a costimulatory ligand, thereby mediating a costimulatory response by the T cell, such as, but not limited to, proliferation. Costimulatory molecules are cell surface molecules other than antigen receptors or their ligands that CD3 zeta, common FcR gamma (FCER1G), Fc gamma RIIa, FcR beta (Fc Epsilon Rib), CD3 gamma, CD3 delta, CD3 epsilon, CD79a, CD79b, DAP10, and DAP12 contribute to an efficient immune response. Costimulatory molecules include, but are not limited to, an MHC class I molecule, BTLA and a Toll ligand receptor, as well as OX40, CD27, CD28, CDS, ICAM-1, LFA-1 (CD11a/CD18), ICOS(CD278), and 4-1BB (CD137). Further examples of such costimulatory molecules include CDS, ICAM-1, GITR, BAFFR, HVEM (LIGHTR), SLAMF7, NKp80 (KLRF1), NKp44, NKp30, NKp46, CD160, CD19, CD4, CD8alpha, CD8beta, IL2R beta, IL2R gamma, IL7R alpha, ITGA4, VLA1, CD49a, ITGA4, IA4, CD49D, ITGA6, VLA-6, CD49f, ITGAD, CD11d, ITGAE, CD103, ITGAL, CD11a, LFA-1, ITGAM, CD11b, ITGAX, CD11c, ITGB1, CD29, ITGB2, CD18, LFA-1, ITGB7, NKG2D, NKG2C, TNFR2, TRANCE/RANKL, DNAM1 (CD226), SLAMF4 (CD244, 2B4), CD84, CD96 (Tactile), CEACAM1, CRTAM, Ly9 (CD229), CD160 (BY55), PSGL1, CD100 (SEMA4D), CD69, SLAMF6 (NTB-A, Ly108), SLAM (SLAMF1, CD150, IPO-3), BLAME (SLAMF8), SELPLG (CD162), LTBR, LAT, GADS, SLP-76, PAG/Cbp, CD19a, and a ligand that specifically binds with CD83.

[0203] A costimulatory intracellular signaling domain can be the intracellular portion of a costimulatory molecule. A costimulatory molecule can be represented in the following protein families: TNF receptor proteins, Immunoglobulin-like proteins, cytokine receptors, integrins, signaling lymphocytic activation molecules (SLAM proteins), and activating NK cell receptors. Examples of such molecules include CD27, CD28, 4-1BB (CD137), OX40, GITR, CD30, CD40, ICOS, BAFFR, HVEM, ICAM-1, lymphocyte function-associated antigen-1 (LFA-1), CD2, CDS, CD7, CD287, LIGHT, NKG2C, NKG2D, SLAMF7, NKp80, NKp30, NKp44, NKp46, CD160, B7-H3, and a ligand that specifically binds with CD83, and the like.

[0204] The intracellular signaling domain can comprise the entire intracellular portion, or the entire native intracellular signaling domain, of the molecule from which it is derived, or a functional fragment or derivative thereof.

[0205] “Complementarity-determining domains” or “complementary-determining regions (“CDRs”) interchangeably refer to the hypervariable regions of VL and VH. The CDRs are the target protein-binding site of the antibody chains that harbors specificity for such target protein. There are three CDRs (CDR1-3, numbered sequentially from the N-terminus) in each human VL or VH, constituting about 15-20% of the variable domains. The CDRs are structurally complementary to the epitope of the target protein and are thus directly responsible for the binding specificity. The remaining stretches of the VL or VH, the so-called framework regions, exhibit less variation in amino acid sequence (Kuby, Immunology, 4th ed., Chapter 4. W.H. Freeman & Co., New York, 2000).

[0206] The positions of the CDRs and framework regions can be determined using various well known definitions in the art, e.g., Kabat, Chothia, international ImMunoGeneTics database (IMGT) (on the worldwide web at www.imgt.org/), and AbM (see, e.g., Johnson et al., Nucleic Acids Res., 29:205-206 (2001); Chothia and Lesk, J. Mol. Biol., 196:901-917 (1987); Chothia et al., Nature, 342:877-883 (1989); Chothia et al., J. Mol. Biol., 227:799-817 (1992); A1-Lazikani et al., J. Mol. Biol., 273:927-748 (1997)). Definitions of antigen combining sites are also described in the following: Ruiz et al., Nucleic Acids Res., 28:219-221 (2000); and Lefranc, M. P., Nucleic Acids Res., 29:207-209 (2001); MacCallum et al., J. Mol. Biol., 262:732-745 (1996); and Martin et al., Proc. Natl. Acad. Sci. USA, 86:9268-9272 (1989); Martin et al., Methods Enzymol., 203:121-153 (1991); and Rees et al., In Sternberg M. J. E. (ed.), Protein Structure Prediction, Oxford University Press, Oxford, 141-172 (1996).

[0207] As used herein, the term “contaminating polynucleotide” refers to a polynucleotide not derived from a lentiviral vector. Contaminating polynucleotides may include, e.g., non-lentiviral polynucleotides derived from a cell in which the lentiviral vector was produced, such as chromosomal mammalian DNA (e.g., human DNA) that is not included within a transgene or other component of a lentiviral vector.

[0208] “Derived from” as that term is used herein, indicates a relationship between a first and a second molecule. It generally refers to structural similarity between the first molecule and a second molecule and does not connotate or include a process or source limitation on a first molecule that is derived from a second molecule. For example, in the case of an intracellular signaling domain that is derived from a CD3zeta molecule, the intracellular signaling domain retains sufficient CD3zeta structure such that it has the required function, namely, the ability to generate a signal under the appropriate conditions. It does not connotate or include a limitation to a particular process of producing the intracellular signaling domain, e.g., it does not mean that, to provide the intracellular signaling domain, one must start with a CD3zeta sequence and delete unwanted sequence, or impose mutations, to arrive at the intracellular signaling domain.

[0209] As used herein, the term “freeze/thaw cycle” refers to exposure of a liquid mixture, such as an aqueous solution or suspension, to a temperature at or less than its freezing point until the mixture is frozen, followed by thawing the mixture at a temperature greater than its freezing point. The freezing step can be performed, e.g., by placing the mixture in an environment in which the temperature is from about −80° C. to about −20° C. The mixture can remain frozen, e.g., for a period of one or more days, weeks, months, or years prior to thawing. The thawing step can be performed by exposing the mixture to conditions in which the temperature is from about 2° C. to about 8° C., or by storing the mixture at room temperature (e.g., the ambient temperature of a laboratory, or about 25° C.). Alternatively, thawing can take place by use of a water bath (e.g., at 37° C.).

[0210] As used herein, the term “hydrodynamic radius” refers to the apparent radius (Rh in nm) of a particle in a solution as inferred from the diffusional characteristics of the particle. The hydrodynamic radius of a viral particle is one factor that dictates the rate of diffusion of the viral particle in aqueous solution, as well as the ability of the particle to migrate in gels of macromolecules. The hydrodynamic radius of a viral particle is determined in part by the mass and molecular structure of each of the components of the particle, as well as its hydration state. Methods for determining the hydrodynamic radius of a viral particle are well known in the art and include the use of dynamic light scattering and size exclusion chromatography.

[0211] As used herein, the term “non-reducing carbohydrate” refers to a carbohydrate that does not exist in a state of chemical equilibrium with an aldehyde, and thus lacks the ability to be oxidized to a carboxylic acid by transition metal cations, such as silver (Ag+) and copper (Cu2+). Exemplary non-reducing carbohydrates include, without limitation, disaccharides such as sucrose, trehalose, and palatinitol, trisaccharides such as raffinose and melezitose, as well as tetrasaccharides such as stachyose. Non-reducing carbohydrates additionally include monosaccharide derivatives such as sorbitol, mannitol, erythritol, and xylitol, disaccharide derivatives such as lacitol and maltitol, aldonic acids and their lactones such as gluconic acid, gluconic acid γ-lactone, aldaric acids and their lactones such as ribaraic acid, arabinaric acid, and galactaric acid, uronic acids such as glucuronic acid, galaccuronic acid, and itiannuronic acid, ester derivatives such as trehalose octaacetate, sucrose octaacetate, and cellobiose octaacetate, and ether derivatives in which hydroxyl groups are O-alkylated. Non-reducing carbohydrates include those that have a D or L stereochemical orientation.

[0212] As used herein, the term “osmolality” refers to a measure of the osmotic pressure of dissolved solute particles in an aqueous solution. The solute particles include both ions as well as non-ionized molecules. Osmolality is expressed as the concentration of osmotically active particles (i.e., osmoles) dissolved in 1 kg of solvent (i.e., water). Osmolality is expressed herein in units of milliosmoles per 1 kg of water (mOsm/kg).

[0213] As used herein, the term “percent by weight per volume” or “% w/v” denotes the percentage weight (in grams) of a single component relative to the total volume of the mixture that contains the component. For instance, 500 mg of a component in a total volume of 8 ml is 6.25% w/v, and 500 mg of a component in a total volume of 5 ml is 10% w/v.

[0214] As used herein, the term “polydispersity” refers to the degree of homogeneity of the sizes of particles, such as lentiviral particles, within a sample. A higher polydispersity indicates less homogeneity and a lower polydispersity indicates a higher level of homogeneity. For instance, when the level of homogeneity is high, lentiviral particles can be considered to be approaching identical sizes and are thus monodisperse. As will be understood by one of ordinary skill in the art, as the polydispersity decreases, the level of homogeneity increases. As such, a lower polydispersity indicates a higher level of homogeneity. For example, a formulation with 15% polydispersity has less homogeneity than a formulation with 10% polydispersity. When the level of homogeneity is low, the particle population can be considered to contain significantly different sizes and thus be polydisperse.

[0215] As used herein, the term “prevent”, “preventing,” or “prevention” of any disease or disorder refers to the prophylactic treatment of the disease or disorder; or delaying the onset or progression of the disease or disorder.

[0216] The term “recognize” as used herein refers to an antibody or antigen binding fragment thereof that finds and interacts (e.g., binds) with its epitope, whether that epitope is linear or conformational. The term “epitope” refers to a site on an antigen to which an antibody or antigen binding fragment of the disclosure specifically binds. Epitopes can be formed both from contiguous amino acids or noncontiguous amino acids juxtaposed by tertiary folding of a protein. Epitopes formed from contiguous amino acids are typically retained on exposure to denaturing solvents, whereas epitopes formed by tertiary folding are typically lost on treatment with denaturing solvents. An epitope typically includes at least 3, 4, 5, 6, 7, 8, 9, 10, 11, 12, 13, 14 or 15 amino acids in a unique spatial conformation. Methods of determining spatial conformation of epitopes include techniques in the art, for example, x-ray crystallography and 2-dimensional nuclear magnetic resonance (see, e.g., Epitope Mapping Protocols in Methods in Molecular Biology, Vol. 66, G. E. Morris, Ed. (1996)).

[0217] As used herein, the term “retroviral packaging protein” refers to a protein derived from a retrovirus, or a variant thereof, that assists with packaging of a nucleic acid (e.g., a viral genome) into an envelope. Exemplary retroviral packaging proteins include gag, pol, and rev, e.g., lentiviral gag, pol, and rev, e.g., the wild-type proteins or variant thereof, e.g., sequences having at least 80%, 90%, or 95% sequence identity thereto. In some embodiments, one or more retroviral packaging protein is provided as a polyprotein.

[0218] As used herein, the term “retroviral envelope protein” refers to a protein derived from a retrovirus, or a variant thereof, that can be assembled into an envelope around a nucleic acid (e.g., a viral genome). An exemplary retroviral envelope protein is env, e.g., wild-type or a variant thereof. In some embodiments, the retroviral envelope protein is a lentiviral envelope protein, e.g., wild-type or a variant thereof. In some embodiments, the retroviral envelope protein is VSV-G, e.g., wild-type or variant thereof. In some embodiments, the retroviral envelop protein is pseudotyped. In some embodiments, the retroviral envelope protein is from a different virus than one or more of the retroviral packaging protein or LTRs of the nucleic acid to be packaged.

[0219] As used herein, the phrases “specifically binds” and “binds” refer to a binding reaction which is determinative of the presence of a particular protein in a heterogeneous population of proteins and other biological molecules that is recognized, e.g., by a ligand with particularity. A ligand (e.g., a protein, proteoglycan, or glycosaminoglycan) that specifically binds to a protein will bind to the protein with a KD of less than 500 nM. For example, a ligand that specifically binds to a protein will bind to the protein with a KD of up to 500 nM (e.g., between 1 pM and 500 nM). A ligand that does not exhibit specific binding to a protein or a domain thereof will exhibit a KD of greater than 500 nM (e.g., greater than 600 nm, 700 nM, 800 nM, 900 nM, 1 μM, 100 μM, 500 μM, or 1 mM) for that particular protein or domain thereof. A variety of assay formats may be used to determine the affinity of a ligand for a specific protein. For example, solid-phase ELISA assays are routinely used to identify ligands that specifically bind a target protein. See, e.g., Harlow & Lane, Antibodies, A Laboratory Manual, Cold Spring Harbor Press, New York (1988) and Harlow & Lane, Using Antibodies, A Laboratory Manual, Cold Spring Harbor Press, New York (1999), for a description of assay formats and conditions that can be used to determine specific protein binding.

[0220] The term “subject” includes human and non-human animals. Non-human animals include all vertebrates, e.g., mammals and non-mammals, such as non-human primates, sheep, dog, cow, chickens, amphibians, and reptiles. Except when noted, the terms “patient” or “subject” are used herein interchangeably.

[0221] The term “therapeutic effector”, as used herein, refers to a molecule (e.g., an RNA or polypeptide) that, at an effective level, can exert a therapeutic effect on a subject.

[0222] The term “therapeutically acceptable amount” or “therapeutically effective dose” interchangeably refers to an amount sufficient to effect the desired result (i.e., a reduction in tumor size, inhibition of tumor growth, prevention of metastasis, inhibition or prevention of viral, bacterial, fungal or parasitic infection). In some embodiments, a therapeutically acceptable amount does not induce or cause undesirable side effects. In some embodiments, a therapeutically acceptable amount induces or causes side effects but only those that are acceptable by the healthcare providers in view of a patient's condition. A therapeutically acceptable amount can be determined by first administering a low dose, and then incrementally increasing that dose until the desired effect is achieved. A “prophylactically effective dosage,” and a “therapeutically effective dosage,” can, in some embodiments, prevent the onset of, or result in a decrease in severity of, respectively, disease symptoms, including symptoms associated with cancer.

[0223] The term “transfection” as used herein refers to the introduction of DNA into a eukaryotic cell. Transfection may be accomplished by a variety of means including but not limited to calcium phosphate-DNA co-precipitation, DEAE-dextran-mediated transfection, polybrene-mediated transfection, electroporation, microinjection, liposome fusion, lipofection, protoplast fusion, retroviral infection, and biolistics.

[0224] As used herein, the terms “treat,” “treating,” or “treatment” of any disease or disorder refers in one embodiment, to ameliorating the disease or disorder (i.e., slowing or arresting or reducing the development of the disease or at least one of the clinical symptoms thereof). In another embodiment, “treat,” “treating,” or “treatment” refers to alleviating or ameliorating at least one physical parameter including those which may not be discernible by the patient. In yet another embodiment, “treat,” “treating,” or “treatment” refers to modulating the disease or disorder, either physically, (e.g., stabilization of a discernible symptom), physiologically, (e.g., stabilization of a physical parameter), or both.

[0225] As used herein, the term “viral titer” refers to the number of infectious vector particles, or “transducing units,” that result in the transfer of a given nucleic acid sequence from the particles into a target cell. Viral titer can be measured by a functional assay, such as an assay described in Xiao et al., Exp. Neurobiol. 144:1 13-124, 1997, or Fisher et al., J. Virol. 70:520-532, 1996, the disclosures of both of which are incorporated by reference in their entirety. Alternatively, viral titer can be measured by determining the quantity of viral DNA that has integrated into a host cell genome, e.g., using polymerase chain reaction (PCR) techniques known in the art.

[0226] As used herein, the term “viral vector” refers to a viral particle which has a capability of introducing a nucleic acid molecule into a host. A viral vector carrying an exogenous gene(s) is typically packaged into an infectious virus particle via virus packaging with the aid of packaging plasmids using specific cell-lines. The infectious virus particle infects a cell to achieve expression of the exogenous gene. A “recombinant” viral vector refers to a viral vector constructed by gene recombinant technologies. A recombinant viral vector can be constructed using any suitable method, such as by transducing or transfecting a packaging cell-line with a nucleic acid encoding the viral genome and subsequently isolating newly packaged viral particles. It is understood that the recombinant technologies may be performed at a stage upstream of production of the viral vector itself. For example, recombinant technologies may be used to produce a plasmid, and the plasmid may then be produced at a larger scale, and finally the plasmid may be introduced into a cell line for packaging to produce the viral vector.

[0227] The term “lentiviral vector” refers to a vector derived from at least a portion of a lentivirus genome, including, for example, a self-inactivating lentiviral vector as provided in Milone et al., Mol. Ther. 17(8): 1453-1464 (2009). Other examples of lentivirus vectors that may be used in the clinic, include but are not limited to, e.g., the LENTIVECTOR® gene delivery technology from Oxford BioMedica, the LENTIMAX™ vector system from Lentigen and the like. Nonclinical types of lentiviral vectors are also available and would be known to one skilled in the art.

### Methods for Producing Lentivirus

[0228] This disclosure provides, inter alia, improved methods for manufacturing lentiviral vectors. The following general steps may be used. First, host cells can be cultured. Exemplary types of host cells, such as human cells lacking the large T antigen, are described in more detail in the section entitled “Host cells” herein. As described in Example 1 herein, host cells lacking the large T antigen can lead to manufacturing advantages compared to host cells comprising the large T antigen.

[0229] In some embodiments, in order to produce large quantities of the cells, the host cells are cultured in sequentially larger vessels (e.g., bioreactors) until sufficiently large numbers of cells are produced.

[0230] Once sufficient numbers of host cells are obtained, the desired nucleic acids can be introduced into the host cells. The nucleic acids may be introduced by transfection, e.g., using the FectoVIR®-AAV transfection reagent, e.g., as described in the section entitled “Transfection” herein. Benefits of FectoVIR®-AAV transfection reagent are described in Examples 2 and 3 herein. The transfected nucleic acids may include a viral genome to be packaged, wherein the viral genome includes a therapeutic gene of interest and sufficient LTR sequence for packaging into a viral particle. Additional nucleic acids that may be introduced into the host cell include plasmids that promote packaging, e.g., plasmids encoding viral gag, pol, env, and rev. In some embodiments, the pH of the culture medium may be shifted downwards before transfection, e.g., from about 7.1 to about 6.7, e.g., as described in the section herein entitled “Culture conditions and transfection conditions” and in Example 4 herein. The cells then begin to produce lentivirus.

[0231] After transfection, a nuclease such as benzonase may be added to the culture media, e.g., as described in the section entitled “Culture media” and in Example 5 herein. Without wishing to be bound by theory, in some embodiments, the cell culture medium is a source of contaminating nucleic acids to the final lentiviral preparation, e.g., the culture medium may contain host cell DNA from lysed host cells. Accordingly, addition of benzonase to the cell culture medium may degrade the contaminating nucleic acids, allowing for improved purification of the lentivirus.

[0232] Next, lentivirus can be harvested from the host cell culture to begin purification of the lentivirus. In some embodiments, harvesting of lentivirus comprises separating the supernatant or cell culture media from the cell. In some embodiments, the cell is not lysed before clarification. In some embodiments, the cells may be lysed, and the lysate may be clarified.

[0233] Purification of the lentivirus from the cell culture media or cell lysate typically involves several sequential purification steps. Purification steps may include filtration (e.g., ultrafiltration) and chromatography steps. In some embodiments, arginine can be added during the purification process, e.g., before or after a filtration step or a chromatography step. Addition of arginine is described, e.g., in the section entitled “Purification” and in Examples 8-12 herein. Without wishing to be bound by theory, in some embodiments, the arginine stabilizes the lentiviral vectors and/or reduces their aggregation.

[0234] The purified lentivirus can be used for a variety of applications. For example, the lentivirus can be used to deliver a gene to cells ex vivo, e.g., to generate CART cells from immune effector cells from an apheresis sample. As another example, the lentivirus may be administered to a subject, to deliver a gene to cells of the subject in situ. For instance, the lentivirus may be used for in vivo CART. In some embodiments, the lentivirus is suitable for administration in a human subject, e.g., a lentivirus encoding a CAR maybe administered to a subject allowing for introduction of the CAR encoding nucleic acid into immune effector cells in the subject's body.

[0235] Naturally occurring lentiviruses are a genus of viruses of the Retroviridae family, characterized by a long incubation period. Lentiviruses can typically deliver a significant amount of genetic information into the DNA of the host cell. Examples of lentiviruses include HIV (human immunodeficiency virus; including HIV type 1, and HIV type 2), the etiologic agent of the human acquired immunodeficiency syndrome (AIDS); visna-maedi, which causes encephalitis (visna) or pneumonia (maedi) in sheep, the caprine arthritis-encephalitis virus, which causes immune deficiency, arthritis, and encephalopathy in goats; equine infectious anemia virus, which causes autoimmune hemolytic anemia, and encephalopathy in horses; feline immunodeficiency virus (FIV), which causes immune deficiency in cats; bovine immune deficiency virus (BIV), which causes lymphadenopathy, lymphocytosis, and possibly central nervous system infection in cattle; and simian immunodeficiency virus (SIV), which cause immune deficiency and encephalopathy in sub-human primates. Diseases caused by these viruses are characterized by a long incubation period and protracted course. Usually, the viruses latently infect monocytes and macrophages, from which they spread to other cells. HIV, FIV, and SIV also readily infect T lymphocytes (i.e., T-cells).

### Transgene

[0236] In some embodiments, the lentivirus or lentiviral vector disclosed herein, may include a nucleic acid, e.g., a transgene, such as a protein-encoding transgene. The nucleic acid may comprise a transgene, e.g., as described in the section herein entitled “Transgene”. The transgene may be operably linked to a promoter sequence. The nucleic acid may also comprise one or more (e.g., two) LTR sequences. Without wishing to be bound by theory, the LTRs may promote insertion of the transgene and promoter into a host cell genome. The LTR sequences may comprise wild-type lentiviral LTR sequences or variants thereof. For instance, the 3′ LTR may comprise a deletion that renders the virus self-inactivating after integration. In addition, the 5′ LTR may be a chimeric LTR. In some embodiments, the transgene can be integrated into the chromosomal DNA of a target cell.

[0237] Exemplary transgenes include those that encode a chimeric antigen receptor (CAR). The CAR may include several domains, such as an antigen binding domain, a transmembrane domain, and one or more signaling domains. In these cases, the signaling domains may contain one or more primary signaling domains (such as a CD3-zeta stimulatory domain) and/or one or more costimulatory signaling domains (such as CD27, CD28, 4-1 BB (CD137), OX40, GITR, CD30, CD40, ICOS, BAFFR, HVEM, ICAM-1, lymphocyte function-associated antigen-1 (LFA-1), CD2, CDS, CD7, CD287, LIGHT, NKG2C, NKG2D, SLAMF7, NKp80, NKp30, NKp44, NKp46, CD160, B7-H3, or a ligand that specifically binds with CD83.

[0238] In some embodiments, the transgene, e.g., a transgene including a CAR, may encode an antigen-binding domain (such as a scFv) that binds a particular target protein or carbohydrate. Exemplary antigens include CD19, CD123, CD22, CD30, CD171, CS-1, C-type lectin-like molecule-1, CD33, epidermal growth factor receptor variant III (EGFRvlll), ganglioside G2 (GD2), ganglioside GD3, TNF receptor family member B cell maturation (BCMA), Tn antigen ((Tn Ag) or (GalNAca-Ser/Thr)), prostate-specific membrane antigen (PSMA), Receptor tyrosine kinase-like orphan receptor 1 (ROR1), Fms-Like Tyrosine Kinase 3 (FLT3), Tumor-associated glycoprotein 72 (TAG 72), CD38, CD44v6, Carcinoembryonic antigen (CEA), Epithelial cell adhesion molecule (EPCAM), B7H3 (CD276), KIT (CD1 17), lnterleukin-13 receptor subunit alpha-2, mesothelin, Interleukin 1 1 receptor alpha (IL-1 1 Ra), prostate stem cell antigen (PSCA), Protease Serine 21, vascular endothelial growth factor receptor 2 (VEGFR2), Lewis(Y) antigen, CD24, Platelet-derived growth factor receptor beta (PDGFR-beta), Stage-specific embryonic antigen-4 (SSEA-4), CD20, Folate receptor alpha, Receptor tyrosine-protein kinase ERBB2 (Her2/neu), Mucin 1, cell surface associated (MUC1), epidermal growth factor receptor (EGFR), neural cell adhesion molecule (NCAM), Prostase, prostatic acid phosphatase (PAP), elongation factor 2 mutated (ELF2M), Ephrin B2, fibroblast activation protein alpha (FAP), insulin-like growth factor 1 receptor (IGF-I receptor), carbonic anhydrase IX (CAIX), Proteasome (Prosome, Macropain) Subunit, Beta Type, 9 (LMP2), glycoprotein 1 00 (gp100), oncogene fusion protein consisting of breakpoint cluster region (BCR) and Abelson murine leukemia viral oncogene homolog 1 (Abl) (bcr-abl), tyrosinase, ephrin type-A receptor 2 (EphA2), Fucosyl GM1, sialyl Lewis adhesion molecule (sLe), ganglioside GM3, transglutaminase 5 (TGS5), high molecular weight-melanoma-associated antigen (HMWMAA), o-acetyl-GD2 ganglioside (OAcGD2), Folate receptor beta, tumor endothelial marker 1 (TEM1/CD248), tumor endothelial marker 7-related (TEM7R), claudin 6 (CLDN6), thyroid stimulating hormone receptor (TSHR), G protein-coupled receptor class C group 5, member D (GPRC5D), chromosome X open reading frame 61 (CXORF61), CD97, CD179a, anaplastic lymphoma kinase (ALK), Polysialic acid, placenta-specific 1 (PLAC1), hexasaccharide portion of globoH glycoceramide (GloboH), mammary gland differentiation antigen (NY-BR-1), uroplakin 2 (UPK2), Hepatitis A virus cellular receptor 1 (HAVCR1), adrenoceptor beta 3 (ADRB3), pannexin 3 (PANX3), G protein-coupled receptor 20 (GPR20), lymphocyte antigen 6 complex, locus K 9 (LY6K), Olfactory receptor 51 E2 (OR51 E2), TCR Gamma Alternate Reading Frame Protein (TARP), Wilms tumor protein (WT1), Cancer/testis antigen 1 (NY-ESO-1), Cancer/testis antigen 2 (LAGE-1 a), Melanoma-associated antigen 1 (MAGE-A1), ETS translocation-variant gene 6, located on chromosome 12p (ETV6-AML), sperm protein 17 (SPA17), X Antigen Family, Member 1 A (XAGE1), angiopoietin-binding cell surface receptor 2 (Tie 2), melanoma cancer testis antigen-1 (MAD-CT-1), melanoma cancer testis antigen-2 (MAD-CT-2), Fos-related antigen 1, tumor protein p53 (p53), p53 mutant, prostein, surviving, telomerase, prostate carcinoma tumor antigen-1, melanoma antigen recognized by T cells 1, Rat sarcoma (Ras) mutant, human Telomerase reverse transcriptase (hTERT), sarcoma translocation breakpoints, melanoma inhibitor of apoptosis (ML-IAP), ERG (transmembrane protease, serine 2 (TMPRSS2) ETS fusion gene), N-Acetyl glucosaminyl-transferase V (NA17), paired box protein Pax-3 (PAX3), Androgen receptor, Cyclin B1, v-myc avian myelocytomatosis viral oncogene neuroblastoma derived homolog (MYCN), Ras Homolog Family Member C (RhoC), Tyrosinase-related protein 2 (TRP-2), Cytochrome P450 1 B1 (CYP1 B1), CCCTC-Binding Factor (Zinc Finger Protein)-Like, Squamous Cell Carcinoma Antigen Recognized By T Cells 3 (SART3), Paired box protein Pax-5 (PAX5), proacrosin binding protein sp32 (OY-TES1), lymphocyte-specific protein tyrosine kinase (LCK), A kinase anchor protein 4 (AKAP-4), synovial sarcoma, X breakpoint 2 (SSX2), Receptor for Advanced Glycation Endproducts (RAGE-1), renal ubiquitous 1 (RU1), renal ubiquitous 2 (RU2), legumain, human papilloma virus E6 (HPV E6), human papilloma virus E7 (HPV E7), intestinal carboxyl esterase, heat shock protein 70-2 mutated (mut hsp70-2), CD79a, CD79b, CD72, Leukocyte-associated immunoglobulin-like receptor 1 (LAIR1), Fc fragment of IgA receptor (FCAR or CD89), Leukocyte immunoglobulin-like receptor subfamily A member 2 (LILRA2), CD300 molecule-like family member f (CD300LF), C-type lectin domain family 12 member A (CLEC12A), bone marrow stromal cell antigen 2 (BST2), EGF-like module-containing mucin-like hormone receptor-like 2 (EMR2), lymphocyte antigen 75 (LY75), Glypican-3 (GPC3), Fc receptor-like 5 (FCRL5), and immunoglobulin lambda-like polypeptide 1 (IGLL1).

[0239] In some embodiments, a lentiviral vector described herein comprises more than one transgene, e.g., a first transgene encoding a first CAR, e.g., a CD19 CAR and a second transgene encoding a second CAR, e.g., a CD22 CAR.

[0240] In some embodiments, a dual CAR lentiviral vector described herein encodes two different CARs, e.g., a CD19 CAR and a CD22 CAR. In some embodiments, the two CARs are part of a single open reading frame and are separated by a protease cleavage site, e.g., a self-cleavage site, e.g., a P2A site. In some embodiments, the open reading frame encodes, from N-terminal to C-terminal, a first leader sequence, a first scFv (e.g., that binds CD22), optionally a first hinge domain, a first transmembrane domain, a first costimulatory domain (e.g., 4-1BB), a first primary signaling domain (e.g., CD3-zeta), a protease cleavage site (e.g., P2A), a second leader sequence, a second scFv (e.g., that binds CD19), optionally a second hinge domain, a second transmembrane domain, a second costimulatory domain (e.g., 4-1BB), and a second primary signaling domain (e.g., CD3-zeta). In some embodiments, the first and second leader sequences have the same sequence. In some embodiments, the first and second hinge domains have the same sequence. In some embodiments, the first and second transmembrane domains have the same sequence. In some embodiments, the first and second costimulatory domains have the same sequence. In some embodiments, the first and second primary signaling domains have the same sequence.

[0241] Additional CARs that can be encoded by transgene described herein are provided, e.g., in the section herein entitled “CAR targets”.

[0242] In some embodiments, a lentiviral vector described herein encodes a siRNA or shRNA that targets a nucleic acid in an immune effector cell. For instance, the siRNA or shRNA may target a nucleic acid encoding a TCR and/or HLA, and/or an inhibitory molecule (e.g., PD1, PD-L1, PD-L2, CTLA4, TIM3, CEACAM (e.g., CEACAM-1, CEACAM-3 and/or CEACAM-5), LAG3, VISTA, BTLA, TIGIT, LAIR1, CD160, 2B4, CD80, CD86, B7-H3 (CD276), B7-H4 (VTCN1), HVEM (TNFRSF14 or CD270), KIR, A2aR, MHC class I, MHC class II, GAL9, adenosine, and TGF beta), in a T cell. Expression systems for siRNA and shRNAs, and exemplary shRNAs, are described, e.g., in paragraphs 649 and 650 of International Application WO2015/142675, filed Mar. 13, 2015, which is incorporated by reference in its entirety. These nucleic acids can also be targeted, for example, using a CRISPER system, Zinc finger nucleases, or TALENs. The immune effector cell may be autologous or allogeneic to the subject to be treated.

[0243] In some embodiments, a lentiviral vector described herein comprises or encodes one or more inhibitor of a methylcytosine dioxygenase gene (e.g., Tet1, Tet2, or Tet3). Uses of such compositions and methods for increasing the functional activities of engineered cells (e.g., gene-modified antigen-specific T cells, such as CAR T cells) are also contemplated. While not to be bound by the theory, disruption of a single allele of a Tet gene (e.g., a Tet1, Tet2, or Tet3) leads to decreased total levels of 5-hydroxymethylcytosine in association with enhanced proliferation, regulation of effector cytokine production and degranulation, and thereby increases CAR T cell proliferation and/or function. In some embodiments, the expression and/or function of Tet2 in said cell has been reduced or eliminated.

[0244] In some embodiments, the inhibitor of Tet1, Tet2 and/or Tet3, is an siRNA or shRNA specific for Tet1, Tet2, Tet3, or nucleic acid encoding said siRNA or shRNA. In some embodiments, the siRNA or shRNA comprises a sequence complementary to a sequence of a Tet2 mRNA, e.g., comprises a target sequence of shRNA listed in Table 4 of WO2017/049166, which application is herein incorporated by reference in its entirety, including Table 4. In some embodiments, the inhibitor of Tet1, Tet2 and/or Tet3, is (1) a gene editing system targeted to one or more sites within the gene encoding Tet1, Tet2 and/or Tet3, or its regulatory elements, e.g., Tet2, or its regulatory elements; (2) nucleic acid encoding one or more components of said gene editing system; or (3) combinations thereof. In some embodiments, the gene editing system is selected from the group consisting of: a CRISPR/Cas9 system, a zinc finger nuclease system, a TALEN system and a meganuclease system.

[0245] In some embodiments, a lentiviral vector described here comprises a transgene, e.g., a transgene encoding a chimeric antigen receptor (CAR) and further comprises a siRNA or shRNA that targets a nucleic acid in an immune effector cell.

### Characteristics of Lentiviral Vectors

[0246] In some embodiments, the lentiviral vectors are characterized by a hydrodynamic radius of 100±25 nm as measured by dynamic light scattering (DLS). For example, the lentiviral vectors may maintain a hydrodynamic radius of 100±25 nm within a temperature range of from 25° C. to 55° C.

[0247] In some embodiments, the lentiviral vectors are characterized by a polydispersity of from 10% to 25%. For example, the lentiviral vectors may maintain a polydispersity of from 10% to 25% within a temperature range of from 25° C. to 55° C.

[0248] In some embodiments, the lentiviral vectors maintains a concentration after 3, 6, or 9 freeze/thaw cycles of from about 70% to about 100% relative to the concentration of the lentiviral vector in the aqueous composition prior to the freeze/thaw cycles, wherein each of the freeze/thaw cycles includes freezing the aqueous composition and subsequently allowing the aqueous composition to thaw at room temperature.

[0249] In some embodiments, a lentivirus prepared, purified or stored using any of the methods or formulations disclosed herein may have lower vector copy number (VCN), e.g., at least 5%, at least 10%, at least 20%, at least 30%, at least 50%, at least 60% lower VCN compared to a lentivirus not produced, purified or stored by the methods or in formulations as described herein, e.g., when tested at MOI of 1.

### Lentiviral Vector Packaging System

[0250] A packaging system can be used to package a nucleic acid, e.g., an RNA encoding a transgene into a lentiviral vector. Accordingly, the systems and methods described herein may comprise, e.g., a lentiviral packaging system comprising at least one plasmid adapted for the production of a lentiviral vector, e.g., a lentiviral vector optionally comprising a transgene. Various lentiviral components useful for the production of a lentiviral vector are known in the art. See for example Zufferey et al., 1997, Nat. Biotechnol. 15:871-875 and Dull et al, 1998, J. Virol. 72(11):8463-8471. The different functions suitable for the production of a lentiviral vector can be provided to the host cells in a lentiviral packaging system comprising one or more nucleic acids (e.g., plasmids), e.g., at least one, two, three, or four plasmids, wherein one plasmid encodes a retroviral envelope protein (Env plasmid), one plasmid encodes one or more retroviral packaging proteins, e.g., Gag and Pol proteins (packaging plasmid or Gag-Pol plasmid), one plasmid encodes a lentiviral Rev protein (Rev plasmid) and one or more plasmids comprising at least one transgene of interest (TOI) expression cassette. In some embodiments, the lentiviral packaging system further comprises, or a method described herein comprises use of, at least one, two, three, or four plasmids. In some embodiments, the lentiviral packaging system further comprises, or a method described herein comprises use of, a fifth plasmid. In certain embodiments, a method described herein comprises transfecting five plasmids into the host cell, wherein the fifth plasmid does not encode a protein of the lentiviral vector packaging system. In some embodiments, the lentiviral packaging system comprises one or more nucleic acids (e.g., plasmids), e.g., five plasmids, wherein one plasmid encodes an expression vector, one plasmid encodes a Tat (e.g., pcDNATat), one plasmid encodes a Rev protein (e.g., pHCMV-Rev), one plasmid encodes a gagpol (e.g., pHCMV-gagpol), and one plasmid encodes VSV-G (e.g., pVSVG), e.g., as described in Rout-Pitt et al., J Biol. Methods 5(2): 1-9, 2018). In some embodiments, a plasmid may comprise a dual gene expression cassette, e.g., a bicistronic cassette, e.g., a bicistronic construct encoding two transgenes of interest. In some embodiments, the first transgene of interest encodes a first CAR, e.g., a CD19 CAR, and the second transgene of interest encodes a second CAR, e.g., a CD22 CAR. In some embodiments the retroviral packaging proteins are derived from a lentivirus, e.g., lentiviral packaging proteins, e.g., lentiviral gag and pol proteins. In some embodiments, the lentiviral gag protein is a wild-type lentiviral gag protein, and in other embodiments it has one or more sequence modifications relative to the wild-type sequence. In some embodiments, the lentiviral pol protein is a wild-type lentiviral pol protein, and in other embodiments it has one or more sequence modifications relative to the wild-type sequence. In some embodiments, the rev protein is a wild-type rev protein, and in other embodiments it has one or more sequence modifications relative to the wild-type sequence. In some embodiments, the lentiviral vector may be a pseudotyped vector, comprising a modified envelope protein, e.g., an envelope protein derived from a different virus or a chimeric envelope protein, e.g., the Env plasmid may encode a VSV-G Env protein, e.g., a wild type VSV-G protein or a modified variant.

[0251] In some embodiments, a lentiviral vector is generated using a packaging system comprising pMDLgpRRE, pRSV-Rev and pMD.G plasmids (Dull et al., supra), but using a kanamycin resistance marker, e.g., a marker that confers resistance to both kanamycin and neomycin, e.g., neomycin phosphotransferase II instead of an ampicillin gene.

[0252] In some embodiments, a system described herein comprises a transfer vector comprising a kanamycin resistance marker, e.g., a marker that confers resistance to both kanamycin and neomycin, e.g., neomycin phosphotransferase II, e.g., instead of an ampicillin gene. In some embodiments, the transfer vector comprises sequence from, e.g., a pELPS construct as disclosed in WO2017087861A or Milone et al., Mol. Ther. 17(8):1453-1464, 2009, each of which is incorporated by reference herein in its entirety. In some embodiments, the therapeutic protein is encoded on a self-inactivating transfer vector that comprises one or more of, e.g., all of, lentiviral 5′ LTR (e.g., a truncated lentiviral 5′ LTR), lentiviral 3′ LTR, cPPT, and WPRE. In some embodiments, the transfer vector lacks one or more of, e.g., all of: a promoter active in bacteria (e.g., lacking all of a T7 promoter, a T3 promoter, and a lac promoter), M13 primer binding site (e.g., lacking both an M13 forward primer binding site and an M13 reverse primer binding site), a phage origin (e.g., f1 ori), and a fluorescent protein-encoding gene (e.g., a GFP, e.g., EGFP). In some embodiments, the transfer vector lacks both of a CAP binding site and lac operator. In some embodiments, the transfer vector comprises pELPS construct as disclosed in WO2017087861, except that the transfer vector lacks a T7 promoter, an M13 forward primer binding site, an f1 ori, a CAP binding site, an IPTG inducible promoter, a lac operator, an M13 reverse primer binding site, a T3 promoter, and EGFP wherein optionally the transfer vector encodes a therapeutic protein, e.g., a CAR. In some embodiments, the transfer vector has one or more of the following properties: (a) is more stable than an otherwise similar control transfer vector, (b) results in lower cell toxicity than an otherwise similar control transfer vector, or (c) results in a lower vector copy number (VCN) when integrated into target cells, e.g., as described herein. In some embodiments, the control transfer vector comprises a T7 promoter, an M13 forward primer binding site, an f1 ori, a CAP binding site, an IPTG inducible promoter, a lac operator, an M13 reverse primer binding site, and a T3 promoter.

[0253] In some embodiments, the gene expression cassette encodes a protein, e.g., a chimeric antigen receptor (CAR). In some embodiments, the gene expression cassette encodes two proteins, e.g., a first CAR and a second CAR. Exemplary transgenes suitable for a gene expression cassette are described in the current disclosure.

### Transfection

[0254] In some embodiments, the different functions for production of a lentiviral vector are provided to a plurality of host cells, e.g., mammalian cells, e.g., HEK293 cells, e.g., Expi293F cells (e.g., plurality of Expi293F cells growing in suspension under serum-free conditions) by transfection, e.g., transient or stable transfection, of a lentiviral packaging system adapted for producing lentiviral vectors. In some embodiments, at least 25%, at least 30%, at least 35%, at least 40%, at least 50%, at least 60%, at least 70%, at least 80%, at least 90%, at least 95% of host cells, e.g., HEK293 cells, e.g., Expi293F cells are transfected. Methods for transfection or infection are well known by those of skill in the art. In some embodiments, at least 0.3 μg, at least 0.4 μg, at least 0.5 μg, at least 0.6 μg, at least 0.7 μg, at least 0.8 μg cells, at least 0.9 μg, or at least 1.0 μg of lentiviral packaging system is provided per million cells for transfection. In some embodiments, a transfection reagent is used for transfecting the host cells, e.g., mammalian cells, e.g., HEK293 cells, e.g., Expi293F cells. In some embodiments, a transfection reagent is used. Transfection reagents are well known in the art and are available from commercial suppliers. Examples of transfection reagents include but are not limited to, Lipofectamine™ (Invitrogen), Polifectamine, LentiTran (Origene), PEIpro® (Polyplus), FectoVIR®-AAV (Polyplus), and ProFection® (Promega). In some embodiments, the transfection reagent, e.g., FectoVIR®-AAV is used at a level of 0.1 μl, 02. μl, 0.3 μl, 0.4 μl, 0.5 μl, 0.6 μl, 0.7 μl, 0.8 μl, 0.9 μl, or 1.0 μl per million cells. In some embodiments the packaging system and the transfection reagent, e.g., FectoVIR®-AAV are used at ratio of about 1:0.5, 1:0.75, 1:1, 1:1.5, or 1:2, or any range therebetween, for transfection.

[0255] In some embodiments, the transfection reagent comprises FectoVIR®-AAV transfection reagent. FectoVIR®-AAV can be obtained, e.g., from Polyplus (850 bd Sebastien Brant, 67400 Illkirch, FRANCE; 1251 Ave of the Americas; 3rd Fl, New York; NY 10020 USA). FectoVIR®-AAV is a chemical-based, animal-free transfection reagent.

[0256] In some embodiments, at the time of transfection the cells (e.g., Expi293F cells) are at a density of about 0.5×10⁶ cells/mL-1×10⁷ cells/mL, 1×10⁶ cells/mL-6×10⁶ cells/mL, 1×10⁶ cells/mL-5×10⁶ cells/mL, 1.50×10⁶ cells/mL-2.50×10⁶ cells/mL, 2.0×10⁶ cells/mL-3.0×10⁶ cells/mL, 2.0×10⁶ cells/mL-2.5×10⁶ cells/mL. In some embodiments, at the time of transfection the cell population has a viability of at least about 80%, 90%, or 95%.

[0257] In some embodiments, the PP/IP (physical particle/infectious particle) ratio is less than 500, 700, 900, 1000, 1100, 1200, 1300, 1400, 1500, 1600, 1700, 1800, 1900, 2000 after transfection.

### Host Cells

[0258] Any host cells suitable for expression of viral vectors, e.g., lentiviral vectors e.g., lentiviral vectors as disclosed herein may be used to carry out the methods disclosed herein. In some embodiments, a suitable host cell is a eukaryotic cell, e.g., a mammalian cell. In some embodiments, the mammalian cells may be genetically modified mammalian cells for expressing a virus, e.g., a lentivirus, e.g., a lentiviral vector or a lentivirus of interest. A number of mammalian cell lines are suitable host cells for recombinant expression of viruses. Mammalian host cell lines include, for example, COS, PER.C6, TM4, VERO, MDCK, BRL-3A, W138, Hep G2, MMT, MRC 5, FS4, CHO, 293T, A431, 3T3, CV-1, C3H10T1/2, Colo205, HEK293, HeLa, L cells, BHK, HL-60, FRhL-2, U937, HaK, Jurkat cells, Rat2, BaF3, 32D, FDCP-1, PC12, Mix, murine myelomas (e.g., SP2/0 and NSO) and C2C12 cells, as well as transformed primate cell lines, hybridomas, normal diploid cells, and cell strains derived from in vitro culture of primary tissue and primary explants. In some embodiments the host cell is a HEK293 cell, including a cell derived from HEK293 cells, e.g., 293F cells, e.g., Expi293F cells. In some embodiments, at least 80%, at least 85%, at least 90%, at least 90%, at least 95% of host cells in a culture express a large T antigen, e.g., a polyomaviral large T antigen, e.g., a SV40 large T antigen, e.g., a mutant SV40 large T antigen. In some embodiments, at least 99%, at least 98%, at least 97%, at least 96%, at least 95% of the host cells in a culture do not express a large T cell antigen. In some embodiments, the host cell is suitable for growing in suspension.

### Culture Process

[0259] The cell lines described herein can be cultured under conditions that allow for the production of lentiviral vector particles, with high titer. Eukaryotic cells, e.g., mammalian cells, e.g., HEK293 cells, e.g., Expi293F cells may be cultured as non-anchorage dependent cells growing freely in suspension throughout the bulk of the culture; or as anchorage-dependent cells requiring attachment to a solid substrate for their propagation (e.g., as a monolayer).

[0260] In some embodiments, a microcarrier system may be used to accommodate cell growth. In some embodiments the microcarrier system may comprise a suspension culture, e.g., a large-scale suspension culture. The suspension culture may be operated in open or closed systems, e.g., batch or fed-batch closed systems. In some embodiments, nutrients are not added, and waste products are not removed through the duration of culture. In some embodiments, nutrients are continuously fed into the system to prolong the growth cycle although cells, products, by products, and waste products, including toxic metabolites, are not removed. In some embodiments, the culture system may be an open, e.g., a continuous system, e.g., a perfusion system or a chemostat system. In some embodiments, the system may comprise one or more cell retention device. Cell retention devices may include, for example, microcarriers, fine mesh spin filters, hollow fibers, flat plate membrane filters, settling tubes, ultrasonic cell retention devices, and the like. In some embodiments, the concentration of cells in the bioreactor are higher than the concentration of cells present the supernatant harvested from the bioreactor. In some embodiments, the concentration of cells in the bioreactor are substantially identical than the supernatant harvested from the bioreactor.

[0261] In continuous fermentation process a defined media often is continuously added to a bioreactor while an equal amount of culture volume is removed simultaneously for product recovery. Continuous cultures generally maintain cells in the log phase of growth at a constant cell density. Continuous or semi-continuous culture methods permit the modulation of one factor or any number of factors that affect cell growth or end product concentration. For example, an approach may limit the carbon source and allow all other parameters to moderate metabolism. In some systems, a number of factors affecting growth may be altered continuously while the cell concentration, measured by media turbidity, is kept constant. Continuous systems often maintain steady state growth and thus the cell growth rate often is balanced against cell loss due to media being drawn off the culture. Methods of modulating nutrients and growth factors for continuous culture processes are known and a variety of methods are known in the art.

[0262] In some embodiments, a culture of suspension cells comprises only cells that are in suspension. In some embodiments, a culture of suspension cells may comprise a small number (e.g., less than 1%) of cells that adhere, e.g., transiently, to a surface.

[0263] “Cell culture” may refer to any in vitro culture of cells. Included within this term are continuous cell lines (e.g., with an immortal phenotype), primary cell cultures, finite cell lines (e.g., non-transformed cells), and any other cell population maintained in vitro.

[0264] In some embodiments, a system or method described herein makes uses of packaging cells or a packaging cell line for production of a viral vector. The cell line may be stably transfected with elements for production of the lentiviral vector, for example retroviral packaging proteins and retroviral envelope protein. Typically, such packaging cells contain one or more expression cassettes which are capable of expressing viral proteins (such as gag, pol and env) but the expression cassettes do not contain a packaging signal. A packaging cell may be a cell cultured in vitro. A packaging cell line may be utilized to create producer cell lines for production of the lentiviral particles, e.g., by providing at least one plasmid comprising at least one transgene of interest (TOI) expression cassette. In some embodiments, a producer cell transiently expresses a plasmid (e.g., a transfer plasmid) encoding a therapeutic effector and comprising sufficient LTR sequence to allow for packaging of RNA comprising the LTR(s) into a viral vector. In some embodiments, a producer cell line stably expresses an expression cassette encoding a therapeutic effector and comprising sufficient LTR sequence to allow for packaging of RNA comprising the LTR(s) into a viral vector.

### Culture Media

[0265] The methods of the current disclosure may be carried out using any media suitable (e.g., supports cell growth and maintenance under the conditions of the current disclosure) for culturing eukaryotic cells, e.g., mammalian cells, e.g., HEK293 cells, e.g., Expi293F cells. The terms “cell culture medium” and “culture medium” (or simply “medium”) refer to a nutrient solution used for growing eukaryote cells e.g., mammalian cells, e.g., HEK293 cells, e.g., Expi293F cells, that typically provides at least one component from one or more of the following categories: (1) salts (e.g., sodium, potassium, magnesium, calcium, etc.) contributing to the osmolality of the medium; (2) an energy source, usually in the form of a carbohydrate such as glucose; (3) all essential amino acids, and usually the basic set of twenty amino acids; (4) vitamins and/or other organic compounds required at low concentrations; and (5) trace elements, where trace elements are defined as inorganic compounds that are typically required at very low concentrations, usually in the micromolar range. Compositions of such media are known in the art (see, e.g., Mather, J. P., et al. (1999) “Culture media, animal cells, large scale production,” Encyclopedia of Bioprocess Technology: Fermentation, Biocatalysis, and Bioseparation, Vol. 2:777-785, hereby incorporated herein by reference in their entirety.) The nutrient solution may optionally be supplemented with one or more of the components from any of the following categories: (a) animal serum; (b) hormones and other growth factors such as, for example, insulin, transferrin, and epidermal growth factor; and (c) hydrolysates of plant, yeast, and/or tissues, including protein hydrolysates thereof.

[0266] In some embodiments, the culture media may comprise serum, e.g., fetal bovine serum (FBS). In some embodiments, the culture media is serum free. In some embodiments, the culture media is chemically defined, e.g., medium lacking animal-derived components. As used herein, “animal-derived” components are any components that are produced in an intact animal (such as, e.g., proteins isolated and purified from serum), or produced using components produced in an intact animal (such as, e.g., an amino acid made by using an enzyme isolated and purified from an animal to hydrolyze a plant source material). By contrast, a protein which has the sequence of an animal protein (i.e., has a genomic origin in an animal) but which is produced in vitro in cell culture (such as, e.g., in a recombinant yeast or bacterial cells or in an established continuous eukaryote cell line, recombinant or not), using media lacking components produced in, or isolated and purified from, an intact animal is not an “animal-derived” component.

[0267] Chemically defined media are media in which all components have a known chemical structure. Chemically-defined medium are available from commercial suppliers, such as, for example, Sigma, ThermoFisher, Invitrogen, JRH Biosciences, and Gibco. In some embodiments, the media is FreeStyle™ 293 Expression Medium. In some embodiments, a concentrated serum may be used, e.g., medium that contains higher concentration of nutrients than is normally necessary and normally provided to a growing culture. In some embodiments, the medium may contain an amino acid(s) derived from any source or method known in the art.

[0268] In some embodiments, an enzyme, e.g., a nuclease, e.g., an endonuclease, e.g., a recombinant endonuclease, e.g., a Benzonase® may be added in the culture media. In some embodiments, at least 2 U/ml, at least 5 U/ml, at least 7 U/ml, at least 10 U/ml, at least 15 U/ml, at least 20 U/ml, at least 25 U/ml, at least 25 U/ml, at least 30 U/ml, at least 35 U/ml, at least 40 U/ml, at least 45 U/ml, at least 50 U/ml, at least 55 U/ml, or at least 60 U/ml of Benzonase® is added. In some embodiments, between 2 U/mL and 10 U/mL, between 10 U/mL and 20 U/mL, between 20 U/mL and 30 U/mL, between 30 U/mL and 40 U/mL, between 40 U/mL and 50 U/mL, or between 50 U/mL and 60 U/mL of Benzonase® is added. In some embodiments, the Benzonase® is added after at a time about 5-40, 10-40, 10-30, 20-30, or about 20 hours or about 24 hours after transfecting the host cells, e.g., Expi293F cells. In some embodiments, the benzonase is added at a concentration of 3-7 U/mL (e.g., about 5 U/mL) at 20-30 hours (e.g., about 24 hours) after transfecting the host cells. In some embodiments, the benzonase is added at a concentration of 3-7 U/mL (e.g. about 5 U/mL) at 1-5 hours (e.g., about 3 hours) after transfecting the host cells. In some embodiments, the benzonase is added at a concentration of 3-7 U/mL (e.g. about 5 U/mL) at 4-8 hours (e.g., about 6 hours) after transfecting the host cells. In some embodiments, the benzonase is added at a concentration of 12-18 U/mL (e.g. about 15 U/mL) at 1-5 hours (e.g., about 3 hours) after transfecting the host cells. In some embodiments, the benzonase is added at a concentration of 12-18 U/mL (e.g. about 15 U/mL) at 4-8 hours (e.g., about 6 hours) after transfecting the host cells. In some embodiments, the benzonase is added at a concentration of 12-18 U/mL (e.g. about 15 U/mL) at 20-30 hours (e.g., about 24 hours) after transfecting the host cells. In some embodiments, the benzonase is added at a concentration of 20-30 U/mL (e.g. about 25 U/mL) at 1-5 hours (e.g., about 3 hours) after transfecting the host cells. In some embodiments, the benzonase is added at a concentration of 20-30 U/mL (e.g. about 25 U/mL) at 4-8 hours (e.g., about 6 hours) after transfecting the host cells. In some embodiments, the benzonase is added at a concentration of 20-30 U/mL (e.g. about 25 U/mL) at 20-30 hours (e.g., about 24 hours) after transfecting the host cells. In some embodiments, the benzonase is added at a concentration of 40-60 U/mL (e.g. about 50 U/mL) at 1-5 hours (e.g., about 3 hours) after transfecting the host cells. In some embodiments, the benzonase is added at a concentration of 40-60 U/mL (e.g. about 50 U/mL) at 4-8 hours (e.g., about 6 hours) after transfecting the host cells. In some embodiments, the benzonase is added at a concentration of 40-60 U/mL (e.g. about 50 U/mL) at 20-30 hours (e.g., about 24 hours) after transfecting the host cells. In some embodiments, the benzonase is added at a concentration of 5 U/mL at about 3 hours after transfecting the host cells. In some embodiments, the benzonase is added at a concentration of 15 U/mL at about 3 hours after transfecting the host cells. In some embodiments, the benzonase is added at a concentration of 25 U/mL at about 3 hours after transfecting the host cells. In some embodiments, the benzonase is added at a concentration of 50 U/mL at about 3 hours after transfecting the host cells. In some embodiments, the benzonase is added at a concentration of 5 U/mL at about 6 hours after transfecting the host cells. In some embodiments, the benzonase is added at a concentration of 15 U/mL at about 6 hours after transfecting the host cells. In some embodiments, the benzonase is added at a concentration of 25 U/mL at about 6 hours after transfecting the host cells. In some embodiments, the benzonase is added at a concentration of 50 U/mL at about 6 hours after transfecting the host cells. In some embodiments, the benzonase is added at a concentration of 5 U/mL at about 24 hours after transfecting the host cells. In some embodiments, the benzonase is added at a concentration of 15 U/mL at about 24 hours after transfecting the host cells. In some embodiments, the benzonase is added at a concentration of 25 U/mL at about 24 hours after transfecting the host cells. In some embodiments, the benzonase is added at a concentration of 50 U/mL at about 24 hours after transfecting the host cells. In some embodiments, a salt, e.g., MgCl₂ is added to the Benzonase®, e.g., in a concentration at about 1-5 mM, 1-3 mM, or about 2 mM. In some embodiments, the methods disclosed herein may comprise addition of Benzonase® in production and/or purification process.

[0269] In some embodiments, a chemical compound may be added to the media to influence culture growth, e.g., inhibition of proliferation, induction of differentiation and induction or repression of gene expression. In some embodiments, the chemical compound is sodium butyrate. In some embodiments, a cell culture medium described herein comprises sodium butyrate.

### Culture Conditions and Transfection Conditions

[0270] Culture conditions can include any culture conditions suitable for maintaining a cell (e.g., in a static or proliferative state). For example, culture conditions can include several parameters, including without limitation, temperature, oxygen content, nutrient content (e.g., glucose content), pH (e.g., increasing or decreasing pH), agitation level (e.g., rotations per minute), gas flow rate (e.g., air, oxygen, nitrogen gas), redox potential, cell density (e.g., optical density), cell viability and the like. A change in culture conditions can comprise an alteration, modification or shift of one or more culture parameters. For example, one can change culture conditions by increasing or decreasing temperature, increasing or decreasing pH (e.g., adding or removing an acid, a base or carbon dioxide), increasing or decreasing oxygen content (e.g., introducing air, oxygen, carbon dioxide, nitrogen), increasing or decreasing air pressure (e.g., by introducing air, oxygen, carbon dioxide, nitrogen), increasing or decreasing agitation, and/or adding or removing a nutrient (e.g., one or more sugars or sources of sugar, biomass, vitamin and the like), increasing or decreasing the ratio of culture and flask volume, or combinations of the foregoing. In some embodiments, a change in culture condition, e.g., increasing or decreasing pH is introduced at a certain time during the culture, e.g., before transfection. In some embodiments, the pH is modified, e.g., adjusted to about 6.0-6.8, e.g., 6.2-6.8, e.g., 6.4-6.8, e.g., 6.7-6.75 before transfection with a lentiviral packaging system.

### Culture Volume and Culture Unit

[0271] The methods of the disclosure may be carried out in a small cell culture, e.g., in a laboratory scale, or in a large-scale culture, e.g., in industrial scale. The methods may be carried out in an appropriate culture unit, e.g., a culture flask or a bioreactor. The bioreactor can be of any size as long as it is useful for culturing cells, e.g., mammalian cells. In some embodiments, the methods of this disclosure are highly scalable, e.g., the plurality of mammalian cells is in a scaled culture (e.g., at least 1 L, at least 2 L, at least 5 L, at least 10 L, at least 15 L, at least 20 L yields a number of transducing units per ml culture that is no less than 30%, 40%, 50%, 60%, 70%, or 80% the number of transducing units per ml culture in an otherwise similar small-scale culture, e.g., 100 ml, 200 ml, e.g., 300 ml, 400 ml, 500 ml. In some embodiments, the scale culturing (i.e., with culture volumes greater than 50 L) and may be particularly amenable to scaling up from small, laboratory scale cultures (e.g., 10 L) to production scale cultures (e.g., 50 L and greater) with minimal modification of culture conditions. The internal conditions of the culture unit, including but not limited to pH, PO₂, and temperature, are typically controlled during the culturing period. A production culture unit refers to the final culture unit used in the production of the polypeptide, virus, and/or any other product of interest. The volume of a large-scale production culture unit is generally greater than about 50 liters, and may be about 100, about 200, about 300, about 500, about 800, about 1000, about 2500, about 5000, about 8000, about 10,000, about 12,0000 L or more, or any intermediate volume. A suitable culture unit or production culture unit may be composed of (i.e., constructed of) any material that is suitable for holding cell cultures suspended in media under the culture conditions contemplated herein, and one that is conducive to mammalian cell, e.g., HEK293 cells, e.g., Expi293F cell growth and viability. Examples of suitable materials include, without limitation, glass, plastic, and/or metal. In some embodiments, the material(s) do not interfere, or do not significantly or do not substantially interfere, with expression and/or stability of the desired product, e.g., the lentiviral vector.

[0272] In some embodiments, the cell culture process is operated in more than one distinct culture units, such as using one or more seed culture unit(s) followed by use of the production culture unit. In some embodiments, the process involves transferring the propagated seed culture from one or more seed culture unit to a large production unit. In some embodiments, expansion of the cells to the production culture unit and the production phase may be accomplished in one physical culture unit, e.g., the cells may be expanded to a final production scale and the process switched to production conditions. The spent medium is harvested at the end of culture period for down-stream processing the lentivirus or lentiviral vector. In some embodiments, harvest may be collected after 24 hours, after 48 hours, after 72 hours, after 96 hours, or after 120 hours post-transfection.

[0273] In some embodiments, down-stream processing comprises purification, formulation and/or long-term storage of the lentivirus. In some embodiments, the viral harvest collected at the end of culture period comprises lentivirus, at a concentration of, e.g., from about 5×10⁶ transducing units per milliliter (TU/mL) to about 7×10⁷ TU/mL (e.g., 5×10⁶ TU/mL, 5.5×10⁶ TU/mL, 6×10⁶ TU/mL, 6.5×10⁶ TU/mL, 7×10⁶ TU/mL, 7.5×10⁶ TU/mL, 8×10⁶ TU/mL, 8.5×10⁶ TU/mL, 9×10⁶ TU/mL, 9.5×10⁶ TU/mL, 1×10⁷ TU/mL, 1.5×10⁷ TU/mL, 2×10⁷ TU/mL, 2.5×10⁷ TU/mL, 3×10⁷ TU/mL, 3.5×10⁷ TU/mL, 4×10⁷ TU/mL, 4.5×10⁷ TU/mL, 5×10⁷ TU/mL, 5.5×10⁷ TU/mL, 6×10⁷ TU/mL, 6.5×10⁷ TU/mL, or 7×10⁷ TU/mL). In some embodiments, the viral harvest collected at the end of culture period comprises lentivirus, at a concentration of at least 5×10⁶ TU/mL, 5.5×10⁶ TU/mL, 6×10⁶ TU/mL, 6.5×10⁶ TU/mL, 7×10⁶ TU/mL, 7.5×10⁶ TU/mL, 8×10⁶ TU/mL, 8.5×10⁶ TU/mL, 9×10⁶ TU/mL, 9.5×10⁶ TU/mL, 1×10⁷ TU/mL, 1.5×10⁷ TU/mL, 2×10⁷ TU/mL, 2.5×10⁷ TU/mL, 3×10⁷ TU/mL, 3.5×10⁷ TU/mL, 4×10⁷ TU/mL, 4.5×10⁷ TU/mL, 5×10⁷ TU/mL, 5.5×10⁷ TU/mL, 6×10⁷ TU/mL, 6.5×10⁷ TU/mL, or 7×10⁷ TU/mL. In some embodiments, the viral harvest collected at the end of culture period comprises lentivirus, at a concentration of 5×10⁶ TU/mL-6×10⁶ TU/mL, 6×10⁶ TU/mL-7×10⁶ TU/mL, 7×10⁶ TU/mL-8×10⁶ TU/mL, 8×10⁶ TU/mL-9×10⁶ TU/mL, 9×10⁶ TU/mL-1×10⁷ TU/mL, 1×10⁷ TU/mL-2×10⁷ TU/mL, 2×10⁷ TU/mL-3×10⁷ TU/mL, 3×10⁷ TU/mL-4×10⁷ TU/mL, 4×10⁷ TU/mL-5×10⁷ TU/mL, 5×10⁷ TU/mL-6×10⁷ TU/mL, 6×10⁷ TU/mL-7×10⁷ TU/mL.

### Purification Methods Including Filtration and Chromatography

[0274] In some aspects, the disclosure provides processes for purifying lentiviral vectors with improved efficiency, e.g., such that higher quantities of lentiviral vector are recovered. In some embodiments, at least one step in the purification process comprises adding an agent, e.g., an amino acid or a salt thereof, e.g., an arginine or a salt thereof, e.g., arginine-HCl to the purification intermediate composition (an intermediate composition comprising a buffer before completion of purification) before further purification, e.g., centrifugation, filtration, or chromatography, to improve the purification process. In some embodiments, filtration may refer to but are not limited to flow filtration, depth filtration, tangential flow filtration. In some embodiments, chromatography may include but are not limited to Size Exclusion Chromatography, Affinity Chromatography, Hydrophobic Interaction Chromatography, Ion Exchange Chromatography.

[0275] In some embodiments, a lentiviral vector produced according to a method described herein has one or more of the following properties: complies with GMP guidelines, is sterile, is substantially free of contaminants, is suitable for pharmaceutical use, is suitable for administration to a human subject, or is suitable for ex vivo treatment of human cells.

[0276] In some embodiments of the methods described herein, a solution or a suspension is subjected to a semi-permeable membrane (filtration) that retains larger particles e.g., viral particles, while allowing solvent and small solute molecules to pass through. In some embodiments, a method described herein uses a filter to remove and exchange salts, sugars, and non-aqueous solvents, to separate free from bound species, to remove low molecular-weight material, and/or to cause the rapid change of ionic and/or pH environments. A filtration step may be used to increase the concentration of vectors in a solution or suspension. In some embodiments, a filtration step is used to increase the concentration of a lentiviral particle in harvest. In some embodiments, a method described herein makes use of a process, technique or combination of techniques comprises a filtration step (e.g., one or more of microfiltration, ultrafiltration, nanofiltration, and diafiltration) either sequentially or simultaneously. In some embodiments, filtration is performed using a flat-sheet membrane or a hollow fiber. In some embodiments, the filtration is performed using an average transmembrane pressure of about 0.1-0.5 bar (e.g., about 0.1, 0.2, 0.3, 0.4, or 0.5 bar). In some embodiments, filtration is performed using a load of 4-100 L/m², e.g., about 4-10, 10-20, 20-30, 30-40, 40-50, 50-60, 60-70, 70-80, or 80-90. In certain embodiments of the present disclosure, a filtration step is employed to exchange the various buffers used in connection with the instant disclosure, optionally in combination with chromatography or other purification steps, and optionally also to remove impurities from viral yield.

[0277] Filtration techniques, such as those described above and known in the art, can be used so as to produce lentiviral preparations that are substantially free of microorganisms and cells (e.g., mammalian cells, e.g., HEK293 cells, e.g., Expi293F cells) from which the lentiviral vector is prepared. Additionally, or alternatively, lentiviral vector preparations of the disclosure may be treated with nucleases so as to produce a preparation that is substantially free of contaminating polynucleotides (e.g., non-lentiviral polynucleotides derived from the cell in which the lentiviral vector was produced, such as chromosomal mammalian DNA, human DNA, RNA, or other polynucleotides that are not included within the lentiviral transgene).

### Buffers, e.g., for Use in Purification

[0278] Various buffers, e.g., an aqueous composition comprising buffering agents comprising buffering agents used for viral vector purification are known in the arts and may include but not limited to sulfonic based acid buffer, e.g., 1,4-piperazinediethanesulfonic acid (PIPES) based buffer (PIPES buffer), polyol-based buffer, tris buffer, phosphate buffer, acetate buffer, citrate buffer. In some embodiments, the buffer used in relation to the purification process disclosed herein is a sulfonic acid-based buffer, e.g., PIPES buffer. In some embodiments, a PIPES buffer may comprise, a buffering agent, e.g., PIPES at a concentration of from about 10 mM to about 50 mM, from about 15 mM to about 40 mM, from about 20 mM to about 30 mM, e.g., about 20 mM.

[0279] In some embodiments, a buffer may further comprise a salt, e.g., Sodium Chloride (NaCl), Magnesium Chloride (MgCl₂), or Calcium Chloride (CaCl₂), or any combination thereof. The salt may be present, e.g., at a concentration of from about 1 mM to about 1 M in the aqueous lentiviral preparation (e.g., 1 mM, 2 mM, 3 mM, 4 mM, 5 mM, 6 mM, 7 mM, 8 mM, 9 mM, 10 mM, 15 mM, 20 mM, 25 mM, 30 mM, 35 mM, 40 mM, 45 mM, 50 mM, 55 mM, 60 mM, 65 mM, 70 mM, 75 mM, 80 mM, 85 mM, 90 mM, 100 mM, 125 mM, 150 mM, 175 mM, 200 mM, 225 mM, 250 mM, 275 mM, 300 mM, 325 mM, 350 mM, 375 mM, 400 mM, 450 mM, 475 mM, 500 mM, 525 mM, 575 mM, 600 mM, 625 mM, 650 mM, 675 mM, 700 mM, 725 mM, 750 mM, 775 mM, 800 mM, 825 mM, 850 mM, 875 mM, 900 mM, 925 mM, 950 mM, 957 mM, or 1 M). In some embodiments, the concentration of salt is from about 25 mM to about 250 mM, about 50 mM to about 75 mM, about 50 mM to about 200 mM, or about 100 mM to about 150 mM (e.g., 25 mM, 30 mM, 35 mM, 40 mM, 45 mM, 50 mM, 55 mM, 60 mM, 65 mM, 70 mM, 75 mM, 80 mM, 85 mM, 90 mM, 100 mM, 125 mM, or 150 mM). In some embodiments, the concentration of salt may be 50 mM or 75 mM, as desired.

[0280] In some embodiments, the buffer may also comprise a carbohydrate, e.g., a non-reducing carbohydrate, e.g., sucrose or trehalose. In some embodiments, the carbohydrate, e.g., sucrose, is present at a concentration of about 30 mM to about 300 mM, from about 40 mM to about 275 mM, from about 50 mM to about 250 mM, from about 60 mM to about 240 mM, from about 70 mM to about 220 mM, from about 30 mM to 150 mm, or from about 150-300 mM. In some embodiments the buffer, e.g., the PIPES buffer, e.g., the filtration buffer, the exchange buffer comprises sucrose at a concentration from about 50 mM to about 80 mM, e.g., about 73 mM. In some embodiments, the buffer, e.g., the PIPES buffer, e.g., the formulation buffer, the storage buffer comprises sucrose at a concentration of from about 200 mM to 250 mM, e.g., about 220 mM.

[0281] In some embodiments, a carbohydrate may be present at a concentration of, e.g., from about 1% to about 10%, from about 2.5% to about 10%, or from about 2.5% to about 5% by weight per volume (w/v) of the aqueous lentiviral preparation. For instance, a carbohydrate, such as a non-reducing carbohydrate described herein, can be present within an aqueous lentiviral preparation at a concentration of 1% w/v, 1.5% w/v, 2% w/v, 2.5% w/v, 3% w/v, 3.5% w/v, 4% w/v, 4.5% w/v, 5% w/v, 5.5% w/v, 6% w/v, 6.5% w/v, 7% w/v, 7.5% w/v, 8% w/v, 8.5% w/v, 9% w/v, 9.5% w/v, or 10% w/v. In some embodiments, a carbohydrate, such as a non-reducing carbohydrate described herein, can be present within an aqueous lentiviral preparation at a concentration of at least 1% w/v, 1.5% w/v, 2% w/v, 2.5% w/v, 3% w/v, 3.5% w/v, 4% w/v, 4.5% w/v, 5% w/v, 5.5% w/v, 6% w/v, 6.5% w/v, 7% w/v, 7.5% w/v, 8% w/v, 8.5% w/v, 9% w/v, 9.5% w/v, or 10% w/v. In some embodiments, a carbohydrate, such as a non-reducing carbohydrate described herein, can be present within an aqueous lentiviral preparation at a concentration of 1% w/v-2% w/v, 2% w/v-3% w/v, 3% w/v-4% w/v, 4% w/v-5% w/v, 5% w/v-6% w/v, 6% w/v-7% w/v, 7% w/v-8% w/v, 8% w/v-9% w/v, 9% w/v-10% w/v.

[0282] In some embodiments, the buffer further comprises e.g., arginine or a salt thereof, e.g., arginine-HCl. In some embodiments, the agent, e.g., arginine or a salt thereof, e.g., arginine monohydrochloride (arginine-HCl) is added at a concentration of about 25-50 mM (e.g., about 50 mM), 50-100 mM (e.g., about 75 mM), 100-200 mM (e.g., about 150 mM), or 200-400 (e.g., about 300) mM. In some embodiments, at least one of buffers, e.g., PIPES buffer used for viral purification (e.g., lentiviral purification using a process disclosed herein) comprises arginine, e.g., arginine-HCl.

[0283] In some embodiments, the pH of the buffers used in the purification process disclosed herein is from about 5.0 to about 8.0, e.g., 6.0 to about 7.0 (e.g., 6.0, 6.1, 6.2, 6.3, 6.4, 6.5, 6.6, 6.7, 6.8, 6.9, or 7.0), e.g., about 6.5.

[0284] In some embodiments, the PIPES buffer may be used as one or more of exchange buffer, filtration buffer, formulation buffer, and/or storage buffer. In some embodiments, the ratio of concentration of PIPES, NaCl, and sucrose are different in PIPES filtration buffer, PIPES exchange buffer, PIPES formulation buffer, and PIPES storage buffer. In some embodiments, the ratio of concentration of PIPES, NaCl, and sucrose are identical in PIPES filtration buffer, PIPES exchange buffer, PIPES formulation buffer, and PIPES storage buffer. In some embodiments the ratio of concentration of PIPES, NaCl, and sucrose are identical in PIPES exchange buffer and PIPES filtration buffer. In some embodiments the ratio of concentration of PIPES, NaCl, sucrose, and optionally arginine, e.g., arginine-HCl are identical in PIPES formulation buffer and PIPES storage buffer.

### Arginine Spike

[0285] In some embodiments, arginine, e.g., arginine-HCl is added to cell culture harvest during purification. In some embodiments, arginine, e.g., arginine-HCl is added to the purification intermediate composition comprising a buffer, e.g., a PIPES buffer or PIPES buffer during purification. In some embodiments, arginine, e.g., arginine-HCl is added to a PIPES buffer that does not comprise arginine. In some embodiments, arginine, e.g., arginine-HCl is added to a PIPES buffer that comprises arginine. In some embodiments, the agent, e.g., arginine or a salt thereof, e.g., arginine monochloride (arginine-HCl) is added at a concentration of about 25-50 mM (e.g., about 50 mM), 50-100 mM (e.g., about 75 mM), 100-200 mM (e.g., about 150 mM), or 200-400 (e.g., about 300) mM.

[0286] In some embodiments the vector recovery, e.g., the amount of transducing units of the lentivirus increases in a purification process which comprises a purification step comprising adding arginine to the purification intermediate composition by about 10%-300%, 20%-180%, 30%-160%, 50%-150%, 75%-125% or about 100% higher relative to a purification process which does not comprise a purification step comprising adding arginine to the purification intermediate composition. In some embodiments, addition of arginine decreases the process time of purification. In some embodiments, when purification comprises addition of e.g., an arginine or a salt thereof, e.g., arginine-HCl, to the purification intermediate composition, the process time of the purification is improved by at least 5%, at least 10%, at least 15%, at least 20%, at least 25%, at least 30%, at least 35%, at least 40%, at least 45%, or by at least 50% compared an otherwise similar purification process which does not comprise adding arginine to the purification intermediate composition. In some embodiments, the purification intermediate composition after addition of arginine or a salt thereof, e.g., arginine-HCl and subsequent purification step shows a total particle concentration per ml of less than 400,000, 300,000, 200,000, or 100,000, as measured by micro-flow imaging. Without wishing to be bound by theory, in some embodiments, the micro-flow imaging does not substantially detect individual lentiviral particles (e.g., infectious viral particles), but detects larger particles comprising aggregates, e.g., aggregates of non-functional virus. In some embodiments, the purification intermediate composition after addition of arginine or a salt thereof, e.g., arginine-HCl and subsequent purification step show a concentration of particles that are ≥10 μm per ml of less than about 5,000, 4,500, 4,000, 3,500, 3,000, or 2,500, as measured by micro-flow imaging. In some embodiments, the purification intermediate composition after addition of arginine or a salt thereof, e.g., arginine-HCl and subsequent purification step show a concentration≥25 μm per ml of less than about 500, 400, 300, or 200, as measured by micro-flow imaging. In some embodiments, the reduction of aggregates reduces blockage of filtration membrane at a given time point. In some embodiments, the arginine stabilizes the lentiviral particles.

[0287] In some embodiments, the purified lentiviral composition comprises a lentiviral vector at a concentration of, e.g., from about 1×10⁷ transducing units per milliliter (TU/mL) to about 7×10⁷ TU/mL (e.g., 1×10⁷ TU/mL, 1.5×10⁷ TU/mL, 2×10⁷ TU/mL, 2.5×10⁷ TU/mL, 3×10⁷ TU/mL, 3.5×10⁷ TU/mL, 4×10⁷ TU/mL, 4.5×10⁷ TU/mL, 5×10⁷ TU/mL, 5.5×10⁷ TU/mL, 6×10⁷ TU/mL, 6.5×10⁷ TU/mL, or 7×10⁷ TU/mL).

### Aqueous Compositions for Lentiviral Storage

[0288] In some embodiments, the disclosure provides a preparation, e.g., an aqueous mixture, e.g., an aqueous solution or a suspension e.g., an aqueous composition comprising a lentiviral vector disclosed herein and a buffer, e.g., a formulation buffer or a storage buffer, e.g., a PIPES buffer, e.g., a PIPES buffer comprising arginine, e.g., arginine-HCl. In some embodiments, lentiviral preparations comprising a formulation buffer or a storage buffer, e.g., a PIPES buffer, e.g., a PIPES buffer comprising arginine, e.g., arginine-HCl exhibit improved biological properties relative to lentiviral preparations containing a conventional lentiviral formulation buffer, such as HEPES. These improved biological characteristics include elevated resistance to aggregation across a range of temperatures and salt concentrations as disclosed in WO2017087861A1. In some embodiments, the PIPES buffer shows an improved transduction capacity at physiological and at elevated temperatures (such as 42° C. and 50° C.), and greater resistance to loss of infectivity during multiple freeze/thaw cycles. Other buffers useful in conjunction with lentiviral preparations of the disclosure include histidine buffers, phosphate buffers, sodium citrate buffers, MES buffers, and MOPS buffers. Lentiviral preparations of the disclosure may optionally include a salt, such as sodium chloride, and may optionally contain a carbohydrate, such as a non-reducing carbohydrate.

[0289] In some embodiments, a PIPES formulation buffer and/or storage buffer may comprise, a buffering agent, e.g., PIPES at a concentration of from about 10 mM to about 50 mM, from about 15 mM to about 40 mM, from about 20 mM to about 30 mM, e.g., about 20 mM. Lentiviral vector preparations can optionally include a salt, such as sodium chloride, magnesium chloride, or calcium chloride. The salt may be present, e.g., at a concentration of from about 1 mM to about 1 M in the aqueous lentiviral preparation (e.g., 1 mM, 2 mM, 3 mM, 4 mM, 5 mM, 6 mM, 7 mM, 8 mM, 9 mM, 10 mM, 15 mM, 20 mM, 25 mM, 30 mM, 35 mM, 40 mM, 45 mM, 50 mM, 55 mM, 60 mM, 65 mM, 70 mM, 75 mM, 80 mM, 85 mM, 90 mM, 100 mM, 125 mM, 150 mM, 175 mM, 200 mM, 225 mM, 250 mM, 275 mM, 300 mM, 325 mM, 350 mM, 375 mM, 400 mM, 450 mM, 475 mM, 500 mM, 525 mM, 575 mM, 600 mM, 625 mM, 650 mM, 675 mM, 700 mM, 725 mM, 750 mM, 775 mM, 800 mM, 825 mM, 850 mM, 875 mM, 900 mM, 925 mM, 950 mM, 957 mM, or 1 M). In some embodiments, the concentration of salt is at least about 1 mM, 2 mM, 3 mM, 4 mM, 5 mM, 6 mM, 7 mM, 8 mM, 9 mM, 10 mM, 15 mM, 20 mM, 25 mM, 30 mM, 35 mM, 40 mM, 45 mM, 50 mM, 55 mM, 60 mM, 65 mM, 70 mM, 75 mM, 80 mM, 85 mM, 90 mM, 100 mM, 125 mM, 150 mM, 175 mM, 200 mM, 225 mM, 250 mM, 275 mM, 300 mM, 325 mM, 350 mM, 375 mM, 400 mM, 450 mM, 475 mM, 500 mM, 525 mM, 575 mM, 600 mM, 625 mM, 650 mM, 675 mM, 700 mM, 725 mM, 750 mM, 775 mM, 800 mM, 825 mM, 850 mM, 875 mM, 900 mM, 925 mM, 950 mM, 957 mM, or 1 M. In some embodiments, the concentration of salt is 1-2 mM, 2-3 mM, 3-4 mM, 4-5 mM, 5-6 mM, 6-7 mM, 7-8 mM, 8-9 mM, 9-10 mM, 10-15 mM, 15-20 mM, 20-25 mM, 25-30 mM, 30-35 mM, 35-40 mM, 40-45 mM, 45-50 mM, 50-55 mM, 55-60 mM, 60-65 mM, 65-70 mM, 70-75 mM, 75-80 mM, 80-85 mM, 85-90 mM, 90-100 mM, 100-125 mM, 125-150 mM, 150-175 mM, 175-200 mM, 200-225 mM, 225-250 mM, 250-275 mM, 275-300 mM, 300-325 mM, 325-350 mM, 350-375 mM, 375-400 mM, 400-450 mM, 450-475 mM, 475-500 mM, 500-525 mM, 525-575 mM, 575-600 mM, 600-625 mM, 625-650 mM, 650-675 mM, 675-700 mM, 700-725 mM, 725-750 mM, 750-775 mM, 775-800 mM, 800-825 mM, 825-850 mM, 850-875 mM, 875-900 mM, 900-925 mM, 925-950 mM, 950-975 mM, or 957 mM-1 M. In some embodiments, the concentration of salt is from about 25 mM to about 250 mM, about 50 mM to about 75 mM, about 50 mM to about 200 mM, or about 100 mM to about 150 mM (e.g., 25 mM, 30 mM, 35 mM, 40 mM, 45 mM, 50 mM, 55 mM, 60 mM, 65 mM, 70 mM, 75 mM, 80 mM, 85 mM, 90 mM, 100 mM, 125 mM, or 150 mM). In some embodiments, the concentration of salt may be 50 mM or 75 mM, as desired.

[0290] A lentiviral vector preparation of the disclosure may optionally contain a carbohydrate, such as a non-reducing carbohydrate as described herein. Exemplary non-reducing carbohydrates include sucrose and trehalose, among others. When included in a lentiviral vector preparation, a carbohydrate may be present at a concentration of, e.g., from about 1% to about 10%, from about 2.5% to about 10%, or from about 2.5% to about 5% by weight per volume (w/v) of the aqueous lentiviral preparation. For instance, a carbohydrate, such as a non-reducing carbohydrate described herein, can be present within an aqueous lentiviral preparation at a concentration of 1% w/v, 1.5% w/v, 2% w/v, 2.5% w/v, 3% w/v, 3.5% w/v, 4% w/v, 4.5% w/v, 5% w/v, 5.5% w/v, 6% w/v, 6.5% w/v, 7% w/v, 7.5% w/v, 8% w/v, 8.5% w/v, 9% w/v, 9.5% w/v, or 10% w/v.

[0291] A lentiviral vector preparation of the disclosure may comprise an amino acid or a salt thereof; such as alanine, arginine, asparagine, aspartic acid, cysteine, glutamic acid, glutamine, glycine, histidine, isoleucine, leucine, lysine, methionine, phenylalanine, proline, serine, threonine, tryptophan, tyrosine, valine or a salt thereof. When included in a lentiviral vector preparation, an amino acid, e.g., arginine-HCl may be present at a concentration of, about 25-50 mM (e.g., about 50 mM), 50-100 mM (e.g., about 75 mM), 100-200 mM (e.g., about 150 mM), or 200-400 (e.g., about 300) mM. In some embodiments, a lentiviral vector preparation as disclosed herein may comprise more than one amino acid or salt thereof, e.g., an arginine or salt thereof and an histidine or salt thereof.

[0292] Lentiviral vector preparations described herein may exhibit a pH, e.g., of from about 5.0 to about 8.0, e.g., 6.0 to about 7.0 (e.g., 6.0, 6.1, 6.2, 6.3, 6.4, 6.5, 6.6, 6.7, 6.8, 6.9, or 7.0). In some embodiments, the pH of the lentiviral vector preparation is 6.5.

[0293] In some embodiments, PIPES formulation buffer and PIPES storage buffer comprises identical composition, e.g., identical concentration of PIPES, NaCl, sucrose, and optionally arginine, e.g., arginine-HCl. In some embodiments, PIPES formulation buffer and PIPES storage buffer comprises different composition, e.g., different concentration of PIPES, NaCl, sucrose, and optionally arginine, e.g., arginine-HCl.

[0294] A lentiviral vector may be present within a lentiviral preparation of the disclosure within a range of concentrations. For instance, a lentiviral vector may be present within a lentiviral preparation at a concentration of, e.g., from about 1×10⁷ transducing units per milliliter (TU/mL) to about 1×10⁹ TU/mL (e.g., 1×10⁷ TU/mL, 2×10⁷ TU/mL, 3×10⁷ TU/mL, 4×10⁷ TU/mL, 5×10⁷ TU/mL, 6×10⁷ TU/mL, 7×10⁷ TU/mL, 8×10⁷ TU/mL, 9×10⁷ TU/mL, 1×10⁸ TU/mL, 1.5×10⁸ TU/mL, 2×10⁸ TU/mL, 2.5×10⁸ TU/mL, 3×10⁸ TU/mL, 3.5×10⁸ TU/mL, 4×10⁸ TU/mL, 4.5×10⁸ TU/mL 5×10⁸ TU/mL, 5.5×10⁸ TU/mL, 6×10⁸ TU/mL, 6.5×10⁸ TU/mL, 7×10⁸ TU/mL, 7.5×10⁸ TU/mL, 8×10⁸ TU/mL, 8.5×10⁸ TU/mL, 9×10⁸ TU/mL, 9.5×10⁸ TU/mL, or 1×10⁹ TU/mL). When desirable, a lentiviral preparation may contain a lentiviral vector at a concentration of from about 3×10⁸ TU/mL to about 5×10⁸ TU/mL (e.g., 3×10⁸ TU/mL, 3.5×10⁸ TU/mL, 4×10⁸ TU/mL, 4.5×10⁸ TU/mL, or 5×10⁸ TU/mL).

[0295] The disclosure also provides aqueous compositions that each include a lentiviral vector, a buffer selected from the group consisting of a phosphate buffer, a sodium citrate buffer, a 2-(N-morpholino)ethanesulfonic acid (MES) buffer, a 3-morpholinopropane-1-sulfonic acid (MOPS) buffer, and a salt (e.g., sodium chloride, magnesium chloride, or calcium chloride). These compositions can further include a carbohydrate, for example, a non-reducing carbohydrate (e.g., sucrose or trehalose).

[0296] In some embodiments, the aqueous composition, e.g., an aqueous composition comprising a lentiviral vector described herein may be stored at low temperatures, e.g., at 10° C., at 6° C., at 4° C., at 0° C., at −10° C., at −20° C., at −30° C., at −40° C., at −50° C., at −60° C., at −70° C., at −80° C., or at −90° C. for a period of time, e.g., for about 20 minutes, 40 minutes, 60 minutes, 1.5 hour, 2 hours, 5 hours, 10 hours, 15 hours, 20 hours, 1 day, 2 days, 3 days, 4 days, 5 days, 7 days, 10 days, 12 days, 14 days, 16 days, 18 days, 20 days, 21 days, or 25 days. In some embodiments, the aqueous composition is stored at less than 10° C., 6° C., 4° C., 0° C., −10° C., −20° C., −30° C., −40° C., −50° C., −60° C., −70° C., −80° C., or −90° C. In some embodiments, a purified lentiviral sample stored in a PIPES storage buffer is stored at −80° C. immediately after purification in a frozen condition. In some embodiments, the lentiviral preparation thus stored may be thawed prior to use and refrozen (e.g., a freeze-thaw cycle). In some embodiments, a lentiviral preparation prepared and stored as disclosed herein may undergo at least 1, at least 2, at least 3, at least 4, at least 5, at least 6, at least 7, at least 8, at least 9 freeze-thaw cycles without any significant loss of stability and/or infectivity. In some embodiments, the preparation displays no more than 0.5%, more than 1%, more than 2%, more than 3%, more than 4%, more than 5%, more than 10%, more than 15%, more than 20%, more than 25%, more than 30%, more than 40%, more than 50%, more than 60%, more than 70%, or more than 80% loss of stability and/or infectivity compared to a lentiviral preparation that never underwent a freeze-thaw cycle.

[0297] In some embodiments, a lentivirus preparation as disclosed herein may be stored at a chilled condition at 4° C. for a period of time, e.g., for about 20 minutes, 40 minutes, 60 minutes, 1.5 hour, 2 hours, 5 hours, 10 hours, 15 hours, 20 hours, 1 day, 2 days, 3 days, 4 days, 5 days, 7 days, 10 days, 12 days, 14 days, 16 days, 18 days, 20 days, 21 days, or 25 days. In some embodiments, a lentiviral preparation as disclosed herein may be stored in a frozen condition at −80° C. for a period of time, e.g., for about 20 minutes, 40 minutes, 60 minutes, 1.5 hour, 2 hours, 5 hours, 10 hours, 15 hours, 20 hours, 1 day, 2 days, 3 days, 4 days, 5 days, 7 days, 10 days, 12 days, 14 days, 16 days, 18 days, 20 days, 21 days, or 25 days. In some embodiments, a lentivirus preparation stored as disclosed (e.g., stored in a frozen condition) herein, displays at least 30%, at least 40%, at least 50%, at least 60%, at least 70%, at least 75%, at least 80%, at least 85%, at least 90%, at least 92%, at least 95%, at least 98%, at least 99% or 100% infectivity compared to a lentivirus that was never frozen. In some embodiments, the lentivirus preparation does not lose more than 0.5%, more than 1%, more than 2%, more than 5%, more than 7%, more than 10%, more than 15%, more than 20%, more than 25%, more than 30%, more than 40%, more than 50%, more than 60%, more than 70%, more than 80% loss of infectivity after undergoing more than 1, (e.g., 2, 3, 4, 5, 6, 7, 8, or 9) freeze-thaw cycles. In some embodiments, a lentivirus preparation stored as disclosed (e.g., stored in a frozen condition) herein, is at least 30%, at least 40%, at least 50%, at least 60%, at least 70%, at least 75%, at least 80%, at least 85%, at least 90%, at least 92%, at least 95%, at least 98%, at least 99% or 100% stable compared to a lentivirus that was never frozen. In some embodiments, a lentivirus preparation is used after freezing for at least 5 hours, at least 12 hours, at least 18 hours, at least 1 days, at least 2 days, at least 3 days, at least 5 days, at least 7 days for improved vector integration.

[0298] The disclosure further includes dried or lyophilized compositions, which are prepared by drying or lyophilizing the aqueous compositions described herein, as well as aqueous compositions that are prepared by reconstituting such dried or lyophilized compositions in a buffer described herein (or another, standard vehicle for administration).

### CAR Targets

[0299] Described herein are viral vectors to transduce immune effector cells (e.g., T cells, NK cells) that are engineered to contain one or more chimeric antigen receptors (CAR)s that direct the immune effector cells to undesired cells (e.g., cancer cells). This is achieved through an antigen binding domain on the CAR that is specific for a cancer associated antigen. Two classes of cancer associated antigens (tumor antigens) that can be targeted by CARs are: (1) cancer associated antigens that are expressed on the surface of cancer cells; and (2) cancer associated antigens that itself is intracellular, however, a fragment of such antigen (peptide) is presented on the surface of the cancer cells by MHC (major histocompatibility complex).

[0300] In some embodiments, the tumor antigen is chosen from one or more of: CD19; CD123; CD22; CD30; CD171; CS-1 (also referred to as CD2 subset 1, CRACC, SLAMF7, CD319, and 19A24); C-type lectin-like molecule-1 (CLL-1 or CLECL1); CD33; epidermal growth factor receptor variant III (EGFRvIII); ganglioside G2 (GD2); ganglioside GD3 (aNeu5Ac(2-8)aNeu5Ac(2-3)bDGalp(1-4)bDGlcp(1-1)Cer); TNF receptor family member B cell maturation (BCMA); Tn antigen ((Tn Ag) or (GalNAcu-Ser/Thr)); prostate-specific membrane antigen (PSMA); Receptor tyrosine kinase-like orphan receptor 1 (ROR1); Fms-Like Tyrosine Kinase 3 (FLT3); Tumor-associated glycoprotein 72 (TAG72); CD38; CD44v6; Carcinoembryonic antigen (CEA); Epithelial cell adhesion molecule (EPCAM); B7H3 (CD276); KIT (CD117); Interleukin-13 receptor subunit alpha-2 (IL-13Ra2 or CD213A2); Mesothelin; Interleukin 11 receptor alpha (IL-11Ra); prostate stem cell antigen (PSCA); Protease Serine 21 (Testisin or PRSS21); vascular endothelial growth factor receptor 2 (VEGFR2); Lewis(Y) antigen; CD24; Platelet-derived growth factor receptor beta (PDGFR-beta); Stage-specific embryonic antigen-4 (SSEA-4); CD20; Folate receptor alpha; Receptor tyrosine-protein kinase ERBB2 (Her2/neu); Mucin 1, cell surface associated (MUC1); epidermal growth factor receptor (EGFR); neural cell adhesion molecule (NCAM); Prostase; prostatic acid phosphatase (PAP); elongation factor 2 mutated (ELF2M); Ephrin B2; fibroblast activation protein alpha (FAP); insulin-like growth factor 1 receptor (IGF-I receptor), carbonic anhydrase IX (CAIX); Proteasome (Prosome, Macropain) Subunit, Beta Type, 9 (LMP2); glycoprotein 100 (gp100); oncogene fusion protein consisting of breakpoint cluster region (BCR) and Abelson murine leukemia viral oncogene homolog 1 (Abl) (bcr-abl); tyrosinase; ephrin type-A receptor 2 (EphA2); Fucosyl GM1; sialyl Lewis adhesion molecule (sLe); ganglioside GM3 (aNeu5Ac(2-3)bDGalp(1-4)bDGlcp(1-1)Cer); transglutaminase 5 (TGS5); high molecular weight-melanoma-associated antigen (HMWMAA); o-acetyl-GD2 ganglioside (OAcGD2); Folate receptor beta; tumor endothelial marker 1 (TEM1/CD248); tumor endothelial marker 7-related (TEM7R); claudin 6 (CLDN6); thyroid stimulating hormone receptor (TSHR); G protein-coupled receptor class C group 5, member D (GPRC5D); chromosome X open reading frame 61 (CXORF61); CD97; CD179a; anaplastic lymphoma kinase (ALK); Polysialic acid; placenta-specific 1 (PLAC1); hexasaccharide portion of globoH glycoceramide (GloboH); mammary gland differentiation antigen (NY-BR-1); uroplakin 2 (UPK2); Hepatitis A virus cellular receptor 1 (HAVCR1); adrenoceptor beta 3 (ADRB3); pannexin 3 (PANX3); G protein-coupled receptor 20 (GPR20); lymphocyte antigen 6 complex, locus K 9 (LY6K); Olfactory receptor 51E2 (OR51E2); TCR Gamma Alternate Reading Frame Protein (TARP); Wilms tumor protein (WT1); Cancer/testis antigen 1 (NY-ESO-1); Cancer/testis antigen 2 (LAGE-1a); Melanoma-associated antigen 1 (MAGE-A1); ETS translocation-variant gene 6, located on chromosome 12p (ETV6-AML); sperm protein 17 (SPA17); X Antigen Family, Member 1A (XAGE1); angiopoietin-binding cell surface receptor 2 (Tie 2); melanoma cancer testis antigen-1 (MAD-CT-1); melanoma cancer testis antigen-2 (MAD-CT-2); Fos-related antigen 1; tumor protein p53 (p53); p53 mutant; prostein; surviving; telomerase; prostate carcinoma tumor antigen-1 (PCTA-1 or Galectin 8), melanoma antigen recognized by T cells 1 (MelanA or MART1); Rat sarcoma (Ras) mutant; human Telomerase reverse transcriptase (hTERT); sarcoma translocation breakpoints; melanoma inhibitor of apoptosis (ML-IAP); ERG (transmembrane protease, serine 2 (TMPRSS2) ETS fusion gene); N-Acetyl glucosaminyl-transferase V (NA17); paired box protein Pax-3 (PAX3); Androgen receptor; Cyclin B1; v-myc avian myelocytomatosis viral oncogene neuroblastoma derived homolog (MYCN); Ras Homolog Family Member C (RhoC); Tyrosinase-related protein 2 (TRP-2); Cytochrome P450 1B1 (CYP1B1); CCCTC-Binding Factor (Zinc Finger Protein)-Like (BORIS or Brother of the Regulator of Imprinted Sites), Squamous Cell Carcinoma Antigen Recognized By T Cells 3 (SART3); Paired box protein Pax-5 (PAX5); proacrosin binding protein sp32 (OY-TES1); lymphocyte-specific protein tyrosine kinase (LCK); A kinase anchor protein 4 (AKAP-4); synovial sarcoma, X breakpoint 2 (SSX2); Receptor for Advanced Glycation End products (RAGE-1); renal ubiquitous 1 (RU1); renal ubiquitous 2 (RU2); legumain; human papilloma virus E6 (HPV E6); human papilloma virus E7 (HPV E7); intestinal carboxyl esterase; heat shock protein 70-2 mutated (mut hsp70-2); CD79a; CD79b; CD72; Leukocyte-associated immunoglobulin-like receptor 1 (LAIR1); Fc fragment of IgA receptor (FCAR or CD89); Leukocyte immunoglobulin-like receptor subfamily A member 2 (LILRA2); CD300 molecule-like family member f (CD300LF); C-type lectin domain family 12 member A (CLEC12A); bone marrow stromal cell antigen 2 (BST2); EGF-like module-containing mucin-like hormone receptor-like 2 (EMR2); lymphocyte antigen 75 (LY75); Glypican-3 (GPC3); Fc receptor-like 5 (FCRL5); and immunoglobulin lambda-like polypeptide 1 (IGLL1).

[0301] A CAR described herein can comprise an antigen binding domain (e.g., antibody or antibody fragment, TCR or TCR fragment) that binds to a tumor-supporting antigen (e.g., a tumor-supporting antigen as described herein). In some embodiments, the tumor-supporting antigen is an antigen present on a stromal cell or a myeloid-derived suppressor cell (MDSC). Stromal cells can secrete growth factors to promote cell division in the microenvironment. MDSC cells can inhibit T cell proliferation and activation. Without wishing to be bound by theory, in some embodiments, the CAR-expressing cells destroy the tumor-supporting cells, thereby indirectly inhibiting tumor growth or survival.

[0302] In embodiments, the stromal cell antigen is chosen from one or more of: bone marrow stromal cell antigen 2 (BST2), fibroblast activation protein (FAP) and tenascin. In an embodiment, the FAP-specific antibody is, competes for binding with, or has the same CDRs as, sibrotuzumab. In embodiments, the MDSC antigen is chosen from one or more of: CD33, CD11b, C14, CD15, and CD66b. Accordingly, in some embodiments, the tumor-supporting antigen is chosen from one or more of: bone marrow stromal cell antigen 2 (BST2), fibroblast activation protein (FAP) or tenascin, CD33, CD11b, C14, CD15, and CD66b.

### CD19

[0303] An non-limiting exemplary tumor antigen is CD19. CARs that bind to CD19 are known in the art. For example, those disclosed in WO2012/079000 and WO2014/153270 may be used in accordance with the present disclosure. Any known CD19 CAR, for example, the CD19 antigen binding domain of any known CD19 CAR, in the art can be used in accordance with the present disclosure. For example, LG-740; CD19 CAR described in the U.S. Pat. Nos. 8,399,645; 7,446,190; Xu et al., Leuk Lymphoma. 2013 54(2):255-260(2012); Cruz et al., Blood 122(17):2965-2973 (2013); Brentjens et al., Blood, 118(18):4817-4828 (2011); Kochenderfer et al., Blood 116(20):4099-102 (2010); Kochenderfer et al., Blood 122 (25):4129-39(2013); and 16th Annu Meet Am Soc Gen Cell Ther (ASGCT) (May 15-18, Salt Lake City) 2013, Abst 10.

[0304] Non-limiting exemplary CD19 CARs include CD19 CARs described herein or an anti-CD19 CAR described in Xu et al. Blood 123.24(2014):3750-9; Kochenderfer et al. Blood 122.25(2013):4129-39, Cruz et al. Blood 122.17(2013):2965-73, NCT00586391, NCT01087294, NCT02456350, NCT00840853, NCT02659943, NCT02650999, NCT02640209, NCT01747486, NCT02546739, NCT02656147, NCT02772198, NCT00709033, NCT02081937, NCT00924326, NCT02735083, NCT02794246, NCT02746952, NCT01593696, NCT02134262, NCT01853631, NCT02443831, NCT02277522, NCT02348216, NCT02614066, NCT02030834, NCT02624258, NCT02625480, NCT02030847, NCT02644655, NCT02349698, NCT02813837, NCT02050347, NCT01683279, NCT02529813, NCT02537977, NCT02799550, NCT02672501, NCT02819583, NCT02028455, NCT01840566, NCT01318317, NCT01864889, NCT02706405, NCT01475058, NCT01430390, NCT02146924, NCT02051257, NCT02431988, NCT01815749, NCT02153580, NCT01865617, NCT02208362, NCT02685670, NCT02535364, NCT02631044, NCT02728882, NCT02735291, NCT01860937, NCT02822326, NCT02737085, NCT02465983, NCT02132624, NCT02782351, NCT01493453, NCT02652910, NCT02247609, NCT01029366, NCT01626495, NCT02721407, NCT01044069, NCT00422383, NCT01680991, NCT02794961, or NCT02456207, each of which is incorporated herein by reference in its entirety.

[0305] In some embodiments, the antigen binding domain binds to CD19 and has the same or a similar binding specificity as the FMC63 scFv fragment described in Nicholson et al. Mol. Immun. 34 (16-17): 1157-1165 (1997). In some embodiments, the antigen binding domain binds to CD19 and includes the scFv fragment described in Nicholson et al. Mol. Immun. 34 (16-17): 1157-1165 (1997).

[0306] In some embodiments, the antigen binding domain (for example, a humanized antigen binding domain) binds to CD19 and comprises a sequence from Table 3 of WO2014/153270, incorporated herein by reference. WO2014/153270 also describes methods of assaying the binding and efficacy of various CAR constructs.

[0307] Humanization of murine CD19 antibody is desired for the clinical setting, where the mouse-specific residues may induce a human-anti-mouse antigen (HAMA) response in patients who receive CART19 treatment, i.e., treatment with T cells transduced with the CAR19 construct. The production, characterization, and efficacy of humanized CD19 CAR sequences is described in International Application WO2014/153270 which is herein incorporated by reference in its entirety, including Examples 1-5 (p. 115-159).

[0308] In some embodiments, the antigen binding domain comprises the parental murine scFv sequence of the CAR19 construct provided in WO2012/079000 (incorporated herein by reference). In some embodiments, the antigen binding domain binds CD19 and comprises a scFv described in WO2012/079000.

[0309] In some embodiments, the CD19 CAR comprises the fusion polypeptide sequence provided as SEQ ID NO: 12 in WO2012/079000, which provides an scFv fragment of murine origin that specifically binds to human CD19.

[0310] In some embodiments, the CD19 CAR comprises an amino acid sequence provided as SEQ ID NO: 12 in WO2012/079000.

[0311] In some embodiments, the CD19 CAR comprises the amino acid sequence: digmtqttsslsaslgdrvtiscrasqdiskylnwyqqkpdgtvklliyhtsrlhsgvpsrfsgsgsgtdysltisnlegediatyfcqqgntlpytfg ggtkleitggggsggggsggggsevklgesgpglvapsgslsvtctvsgvslpdygvswirqpprkglewlgviwgsettyynsalksrltiik dnsksqvflkmnslqtddtaiyycakhyyyggsyamdywgqgtsvtvsstttpaprpptpaptiasqplslrpeacrpaaggavhtrgldfac diyiwaplagtcgvlllslvitlyckrgrkkllyifkqpfmrpvqttgeedgcscrfpeeeeggcelrvkfsrsadapaykqggnglynelnlgrr eeydvldkrrgrdpemggkprrknpgeglynelqkdkmaeayseigmkgerrrgkghdglygglstatkdtydalhmgalppr (SEQ ID NO: 757), or a sequence substantially homologous thereto.

[0312] In some embodiments, the CD19 CAR comprises the amino acid sequence: eivmtqspatlslspgeratlscrasqdiskylnwyqqkpgqaprlliyhtsrlhsgiparfsgsgsgtdytltisslqpedfavyfcqqgntlpytf gqgtkleikggggsggggsggggsqvqlqesgpglvkpsetlsltctvsgvslpdygvswirqppgkglewigviwgsettyyqsslksrvtis kdnsknqvslklssvtaadtavyycakhyyyggsyamdywgqgtlvtvss (SEQ ID NO: 758)

[0313] In some embodiments, the CD19 CAR is a humanized CD19 CAR comprising the amino acid sequence: eivmtqspatlslspgeratlscrasqdiskylnwyqqkpgqaprlliyhtsrlhsgiparfsgsgsgtdytltisslqpedfavyfcqqgntlpytf gqgtkleikggggsggggsggggsqvqlqesgpglvkpsetlsltctvsgvslpdygvswirqppgkglewigviwgsettyyqsslksrvtis kdnsknqvslklssvtaadtavyycakhyyyggsyamdywgqgtlvtvsstttpaprpptpaptiasqplslrpeacrpaaggavhtrgldfac diyiwaplagtcgvlllslvitlyckrgrkkllyifkqpfmrpvqttgeedgcscrfpeeeeggcelrvkfsrsadapaykqggnglynelnlgrr eeydvldkrrgrdpemggkprrknpqeglynelqkdkmaeayseigmkgerrrgkghdglyqglstatkdtydalhmqalppr (SEQ ID NO: 759)

[0314] In some embodiments, CD19 CARs comprise a sequence, for example, a CDR, VH, VL, scFv, or full-CAR sequence, disclosed in Table 1 below, or a sequence having at least 80%, 85%, 90%, 95%, or 99% identity thereto.

TABLE 1
Amino acid and nucleic acid sequences of exemplary anti-CD19 molecules

| SEQ ID NO | Region | Sequence |
|---|---|---|
| CTL019 | | |
| 760 | HCDR1 | DYGVS |
| | (Kabat) | |
| 761 | HCDR2 | VIWGSETTYYNSALKS |
| | (Kabat) | |
| 762 | HCDR3 | HYYYGGSYAMDY |
| | (Kabat) | |
| 763 | LCDR1 | RASQDISKYLN |
| | (Kabat) | |
| 764 | LCDR2 | HTSRLHS |
| | (Kabat) | |
| 765 | LCDR3 | QQGNTLPYT |
| | (Kabat) | |
| 766 | CTL019 | MALPVTALLLPLALLLHAARPdiqmtqttsslsaslgdrvtiscrasqdisky1 |
| | Full amino | nwyqqkpdgtvklliyhtsrlhsgvpsrfsgsgsgtdysltisnleqediatyfcqqgntlpytf |
| | acid | gggtkleitggggsggggsggggsevklqesgpglvapsqslsvtctvsgvslpdygvswir |
| | sequence | qpprkglewlgviwgsettyynsalksrltiikdnsksqvflkmnslqtddtaiyycakhyy |
| | | yggsyamdywgqgtsvtvsstttpaprpptpaptiasqplslrpeacrpaaggavhtrgldfa |
| | | cdiyiwaplagtcgvlllslvitlyckrgrkkllyifkqpfmrpvqttqeedgcscrfpeeeeg |
| | | gcelrvkfsrsadapaykqgqnqlynelnlgrreeydvldkrrgrdpemggkprrknpqeg |
| | | lynelqkdkmaeayseigmkgerrrgkghdglyqglstatkdtydalhmqalppr |
| 685 | CTL019 | atggccttaccagtgaccgccttgctcctgccgctggccttgctgctccacgccgccaggccg |
| | Full | gacatccagatgacacagactacatcctccctgtctgcctctctgggagacagagtcaccatca |
| | nucleotide | gttgcagggcaagtcaggacattagtaaatatttaaattggtatcagcagaaaccagatggaact |
| | sequence | gttaaactcctgatctaccatacatcaagattacactcaggagtcccatcaaggttcagtggcagt |
| | | gggtctggaacagattattctctcaccattagcaacctggagcaagaagatattgccacttactttt |
| | | gccaacagggtaatacgcttccgtacacgttcggaggggggaccaagctggagatcacaggt |
| | | ggcggtggctcgggcggtggtgggtcgggtggcggcggatctgaggtgaaactgcaggagt |
| | | caggacctggcctggtggcgccctcacagagcctgtccgtcacatgcactgtctcaggggtct |
| | | cattacccgactatggtgtaagctggattcgccagcctccacgaaagggtctggagtggctgg |
| | | gagtaatatggggtagtgaaaccacatactataattcagctctcaaatccagactgaccatcatc |
| | | aaggacaactccaagagccaagttttcttaaaaatgaacagtctgcaaactgatgacacagcca |
| | | tttactactgtgccaaacattattactacggtggtagctatgctatggactactggggccaaggaa |
| | | cctcagtcaccgtctcctcaaccacgacgccagcgccgcgaccaccaacaccggcgcccac |
| | | catcgcgtcgcagcccctgtccctgcgcccagaggcgtgccggccagcggggggggcgc |
| | | agtgcacacgagggggctggacttcgcctgtgatatctacatctgggcgcccttggccgggac |
| | | ttgtggggtccttctcctgtcactggttatcaccctttactgcaaacggggcagaaagaaactcct |
| | | gtatatattcaaacaaccatttatgagaccagtacaaactactcaagaggaagatggctgtagct |
| | | gccgatttccagaagaagaagaaggaggatgtgaactgagagtgaagttcagcaggagcgc |
| | | agacgcccccgcgtacaagcagggccagaaccagctctataacgagctcaatctaggacgaa |
| | | gagaggagtacgatgttttggacaagagacgtggccgggaccctgagatggggggaaagcc |
| | | gagaaggaagaaccctcaggaaggcctgtacaatgaactgcagaaagataagatggcggag |
| | | gcctacagtgagattgggatgaaaggcgagcgccggaggggcaaggggcacgatggccttt |
| | | accagggtctcagtacagccaccaaggacacctacgacgcccttcacatgcaggccctgccc |
| | | cctcgc |
| 686 | CTL019 | Diqmtqttsslsaslgdrvtiscrasqdiskylnwyqqkpdgtvklliyhtsrlhsgvpsrfsg |
| | scFv domain | sgsgtdysltisnleqediatyfcqqgntlpytfgggtkleitggggsggggsggggsevklqe |
| | | sgpglvapsqslsvtctvsgvslpdygvswirqpprkglewlgviwgsettyynsalksrltii |
| | | kdnsksqvflkmnslqtddtaiyycakhyyyggsyamdywgqgtsvtvss |
| Humanized | | |
| CAR2 | | |
| 760 | HCDR1 | DYGVS |
| | (Kabat) | |
| 687 | HCDR2 | VIWGSETTYYQSSLKS |
| | (Kabat) | |
| 762 | HCDR3 | HYYYGGSYAMDY |
| | (Kabat) | |
| 763 | LCDR1 | RASQDISKYLN |
| | (Kabat) | |
| 764 | LCDR2 | HTSRLHS |
| | (Kabat) | |
| 76- | LCDR3 | QQGNTLPYT |
| | (Kabat) | |
| 758 | CAR2 scFv | EIVMTQSPATLSLSPGERATLSCRASQDISKYLNWYQQKPG |
| | domain-aa | QAPRLLIYHTSRLHSGIPARFSGSGSGTDYTLTISSLQPEDFA |
| | (Linker is | VYFCQQGNTLPYTFGQGTKLEIKGGGGSGGGGSGGGGSQV |
| | underlined) | QLQESGPGLVKPSETLSLTCTVSGVSLPDYGVSWIRQPPGKG |
| | | LEWIGVIWGSETTYYQSSLKSRVTISKDNSKNQVSLKLSSVT |
| | | AADTAV-YCAKHYYYGGSYAMDYWGQGTLVTVSS |
| 688 | CAR2 scFv | atggccctccctgtcaccgccctgctgcttccgctggctcttctgctccacgccgctcggcccga |
| | domain-nt | aattgtgatgacccagtcacccgccactcttagcctttcacccggtgagcgcgcaaccctgtctt |
| | | gcagagcctcccaagacatctcaaaataccttaattggtatcaacagaagcccggacaggctc |
| | | ctcgccttctgatctaccacaccagccggctccattctggaatccctgccaggttcagcggtagc |
| | | ggatctgggaccgactacaccctcactatcagctcactgcagccagaggacttcgctgtctattt |
| | | ctgtcagcaagggaacaccctgccctacacctttggacagggcaccaagctcgagattaaagg |
| | | tggaggtggcagcggaggaggtgggtccggcggtggaggaagccaggtccaactccaaga |
| | | aagcggaccgggtcttgtgaagccatcagaaactctttcactgacttgtactgtgagcggagtgt |
| | | ctctccccgattacggggtgtcttggatcagacagccaccggggaagggtctggaatggattg |
| | | gagtgatttggggctctgagactacttactaccaatcatccctcaagtcacgcgtcaccatctcaa |
| | | aggacaactctaagaatcaggtgtcactgaaactgtcatctgtgaccgcagccgacaccgccg |
| | | tgtactattgcgctaagcattactattatggcgggagctacgcaatggattactggggacagggt |
| | | actctggtcaccgt-tccagccaccaccatcatcaccatcaccat |
| 689 | CAR 2- | MALPVTALLLPLALLLHAARPEIVMTQSPATLSLSPGERATL |
| | Full-aa | SCRASQDISKYLNWYQQKPGQAPRLLIYHTSRLHSGIPARFS |
| | | GSGSGTDYTLTISSLQPEDFAVYFCQQGNTLPYTFGQGTKLE |
| | | IKGGGGSGGGGSGGGGSQVQLQESGPGLVKPSETLSLTCTV |
| | | SGVSLPDYGVSWIRQPPGKGLEWIGVIWGSETTYYQSSLKS |
| | | RVTISKDNSKNQVSLKLSSVTAADTAVYYCAKHYYYGGSY |
| | | AMDYWGQGTLVTVSSTTTPAPRPPTPAPTIASQPLSLRPEAC |
| | | RPAAGGAVHTRGLDFACDIYIWAPLAGTCGVLLLSLVITLY |
| | | CKRGRKKLLYIFKQPFMRPVQTTQEEDGCSCRFPEEEEGGC |
| | | ELRVKFSRSADAPAYKQGQNQLYNELNLGRREEYDVLDKR |
| | | RGRDPEMGGKPRRKNPQEGLYNELQKDKMAEAYSEIGMK |
| | | GERR-GKGHDGLYQGLSTATKDTYDALHMQALPPR |
| 690 | CAR 2- | atggccctccctgtcaccgccctgctgcttccgctggctcttctgctccacgccgctcggcccga |
| | Full-nt | aattgtgatgacccagtcacccgccactcttagcctttcacccggtgagcgcgcaaccctgtctt |
| | | gcagagcctcccaagacatctcaaaataccttaattggtatcaacagaagcccggacaggctc |
| | | ctcgccttctgatctaccacaccagccggctccattctggaatccctgccaggttcagcggtagc |
| | | ggatctgggaccgactacaccctcactatcagctcactgcagccagaggacttcgctgtctattt |
| | | ctgtcagcaagggaacaccctgccctacacctttggacagggcaccaagctcgagattaaagg |
| | | tggaggtggcagcggaggaggtgggtccggcggtggaggaagccaggtccaactccaaga |
| | | aagcggaccgggtcttgtgaagccatcagaaactctttcactgacttgtactgtgagcggagtgt |
| | | ctctccccgattacggggtgtcttggatcagacagccaccggggaagggtctggaatggattg |
| | | gagtgatttggggctctgagactacttactaccaatcatccctcaagtcacgcgtcaccatctcaa |
| | | aggacaactctaagaatcaggtgtcactgaaactgtcatctgtgaccgcagccgacaccgccg |
| | | tgtactattgcgctaagcattactattatggcgggagctacgcaatggattactggggacagggt |
| | | actctggtcaccgtgtccagcaccactaccccagcaccgaggccacccaccccggctcctac |
| | | catcgcctcccagcctctgtccctgcgtccggaggcatgtagacccgcagctggtggggccgt |
| | | gcatacccggggtcttgacttcgcctgcgatatctacatttgggcccctctggctggtacttgcgg |
| | | ggtcctgctgctttcactcgtgatcactctttactgtaagcgcggtcggaagaagctgctgtacat |
| | | ctttaagcaacccttcatgaggcctgtgcagactactcaagaggaggacggctgttcatgccgg |
| | | ttcccagaggaggaggaaggcggctgcgaactgcgcgtgaaattcagccgcagcgcagatg |
| | | ctccagcctacaagcaggggcagaaccagctctacaacgaactcaatcttggtcggagagag |
| | | gagtacgacgtgctggacaagcggagaggacgggacccagaaatgggcgggaagccgcg |
| | | cagaaagaatccccaagagggcctgtacaacgagctccaaaaggataagatggcagaagcc |
| | | tatagcgagattggtatgaaaggggaacgcagaagaggcaaaggccacgacggactgtacc |
| | | agggactcagcaccgccaccaaggacacctatgacgctcttcacatgcaggccctgccgcct |
| | | cgg |
| 349 | CAR 2A- | MALPVTALLLPLALLLHAARPEIVMTQSPATLSLSPGERATL |
| | Full amino | SCRASQDISKYLNWYQQKPGQAPRLLIYHTSRLHSGIPARFS |
| | acid | GSGSGTDYTLTISSLQPEDFAVYFCQQGNTLPYTFGQGTKLE |
| | sequence; | IKGGGGSGGGGSGGGGSQVQLQESGPGLVKPSETLSLTCTV |
| | signal | SGVSLPDYGVSWIRQPPGKGLEWIGVIWGSETTYYQSSLKS |
| | peptide | RVTISKDNSKNQVSLKLSSVTAADTAVYYCAKHYYYGGSY |
| | underlined | AMDYWGQGTLVTVSSTTTPAPRPPTPAPTIASQPLSLRPEAC |
| | | RPAAGGAVHTRGLDFACDIYIWAPLAGTCGVLLLSLVITLY |
| | | CKRGRKKLLYIFKQPFMRPVQTTQEEDGCCRFPEEEEGGC |
| | | ELRVKFSRSADAPAYQQGQNQLYNELNLGRREEYDVLDKR |
| | | RGRDPEMGGKPRRKNPQEGLYNELQKDKMAEAYSEIGMK |
| | | GERRRGKGHDGLYQGLSTATKDTYDALHMQALPPR |
| 225 | CAR 2A- | EIVMTQSPATLSLSPGERATLSCRASQDISKYLNWYQQKPG |
| | amino acid | QAPRLLIYHTSRLHSGIPARFSGSGSGTDYTLTISSLQPEDFA |
| | sequence; | VYFCQQGNTLPYTFGQGTKLEIKGGGGSGGGGSGGGGSQV |
| | no signal | QLQESGPGLVKPSETLSLTCTVSGVSLPDYGVSWIRQPPGKG |
| | peptide | LEWIGVIWGSETTYYQSSLKSRVTISKDNSKNQVSLKLSSVT |
| | | AADTAVYYCAKHYYYGGSYAMDYWGQGTLVTVSSTTTPA |
| | | PRPPTPAPTIASQPLSLRPEACRPAAGGAVHTRGLDFACDIYI |
| | | WAPLAGTCGVLLLSLVITLYCKRGRKKLLYIFKQPFMRPVQ |
| | | TTQEEDGCSCRFPEEEEGGCELRVKFSRSADAPAYQQGQNQ |
| | | LYNELNLGRREEYDVLDKRRGRDPEMGGKPRRKNPQEGLY |
| | | NELQKDKMAEAYSEIGMKGERRRGKGHDGLYQGLSTATK |
| | | DTYDALHMQALPPR |
| 354 | CAR 2A | atggccctccctgtcaccgccctgctgcttccgctggctcttctgctccacgccgctcggcccga |
| | full nucleic | aattgtgatgacccagtcacccgccactcttagcctttcacccggtgagcgcgcaaccctgtctt |
| | acid | gcagagcctcccaagacatctcaaaataccttaattggtatcaacagaagcccggacaggctc |
| | sequence; | ctcgccttctgatctaccacaccagccggctccattctggaatccctgccaggttcagcggtagc |
| | signal | ggatctgggaccgactacaccctcactatcagctcactgcagccagaggacttcgctgtctattt |
| | peptide and | ctgtcagcaagggaacaccctgccctacacctttggacagggcaccaagctcgagattaaagg |
| | stop codon | tggaggtggcagcggaggaggtgggtccggcggtggaggaagccaggtccaactccaaga |
| | underlined | aagcggaccgggtcttgtgaagccatcagaaactctttcactgacttgtactgtgagcggagtgt |
| | | ctctccccgattacggggtgtcttggatcagacagccaccggggaagggtctggaatggattg |
| | | gagtgatttggggctctgagactacttactaccaatcatccctcaagtcacgcgtcaccatctcaa |
| | | aggacaactctaagaatcaggtgtcactgaaactgtcatctgtgaccgcagccgacaccgccg |
| | | tgtactattgcgctaagcattactattatggcgggagctacgcaatggattactggggacagggt |
| | | actctggtcaccgtgtccagcaccactaccccagcaccgaggccacccaccccggctcctac |
| | | catcgcctcccagcctctgtccctgcgtccggaggcatgtagacccgcagctggtggggccgt |
| | | gcatacccggggtcttgacttcgcctgcgatatctacatttgggcccctctggctggtacttgcgg |
| | | ggtcctgctgctttcactcgtgatcactctttactgtaagcgcggtcggaagaagctgctgtacat |
| | | ctttaagcaacccttcatgaggcctgtgcagactactcaagaggaggacggctgttcatgccgg |
| | | ttcccagaggaggaggaaggcggctgcgaactgcgcgtgaaattcagccgcagcgcagatg |
| | | ctccagcctaccagcaggggcagaaccagctctacaacgaactcaatcttggtcggagagag |
| | | gagtacgacgtgctggacaagcggagaggacgggacccagaaatgggcgggaagccgcg |
| | | cagaaagaatccccaagagggcctgtacaacgagctccaaaaggataagatggcagaagcc |
| | | tatagcgagattggtatgaaaggggaacgcagaagaggcaaaggccacgacggactgtacc |
| | | agggactcagcaccgccaccaaggacacctatgacgctcttcacatgcaggccctgccgcct |
| | | cggtaa |
| 355 | CAR 2A | atggccctccctgtcaccgccctgctgcttccgctggctcttctgctccacgccgctcggcccga |
| | nucleic acid | aattgtgatgacccagtcacccgccactcttagcctttcacccggtgagcgcgcaaccctgtctt |
| | sequence; | gcagagcctcccaagacatctcaaaataccttaattggtatcaacagaagcccggacaggctc |
| | signal | ctcgccttctgatctaccacaccagccggctccattctggaatccctgccaggttcagcggtagc |
| | peptide | ggatctgggaccgactacaccctcactatcagctcactgcagccagaggacttcgctgtctattt |
| | underlined; | ctgtcagcaagggaacaccctgccctacacctttggacagggcaccaagctcgagattaaagg |
| | no stop | tggaggtggcagcggaggaggtgggtccggcggtggaggaagccaggtccaactccaaga |
| | codon | aagcggaccgggtcttgtgaagccatcagaaactctttcactgacttgtactgtgagcggagtgt |
| | | ctctccccgattacggggtgtcttggatcagacagccaccggggaagggtctggaatggattg |
| | | gagtgatttggggctctgagactacttactaccaatcatccctcaagtcacgcgtcaccatctcaa |
| | | aggacaactctaagaatcaggtgtcactgaaactgtcatctgtgaccgcagccgacaccgccg |
| | | tgtactattgcgctaagcattactattatggcgggagctacgcaatggattactggggacagggt |
| | | actctggtcaccgtgtccagcaccactaccccagcaccgaggccacccaccccggctcctac |
| | | catcgcctcccagcctctgtccctgcgtccggaggcatgtagacccgcagctggtggggccgt |
| | | gcatacccggggtcttgacttcgcctgcgatatctacatttgggcccctctggctggtacttgcgg |
| | | ggtcctgctgctttcactcgtgatcactctttactgtaagcgcggtcggaagaagctgctgtacat |
| | | ctttaagcaacccttcatgaggcctgtgcagactactcaagaggaggacggctgttcatgccgg |
| | | ttcccagaggaggaggaaggcggctgcgaactgcgcgtgaaattcagccgcagcgcagatg |
| | | ctccagcctaccagcaggggcagaaccagctctacaacgaactcaatcttggtcggagagag |
| | | gagtacgacgtgctggacaagcggagaggacgggacccagaaatgggcgggaagccgcg |
| | | cagaaagaatccccaagagggcctgtacaacgagctccaaaaggataagatggcagaagcc |
| | | tatagcgagattggtatgaaaggggaacgcagaagaggcaaaggccacgacggactgtacc |
| | | agggactcagcaccgccaccaaggacacctatgacgctcttcacatgcaggccctgccgcct |
| | | cgg |
| 356 | CAR 2A | gaaattgtgatgacccagtcacccgccactcttagcctttcacccggtgagcgcgcaaccctgt |
| | nucleic acid | cttgcagagcctcccaagacatctcaaaataccttaattggtatcaacagaagcccggacaggc |
| | sequence; | tcctcgccttctgatctaccacaccagccggctccattctggaatccctgccaggttcagcggta |
| | no signal | gcggatctgggaccgactacaccctcactatcagctcactgcagccagaggacttcgctgtcta |
| | peptide; stop | tttctgtcagcaagggaacaccctgccctacacctttggacagggcaccaagctcgagattaaa |
| | codon | ggtggaggtggcagcggaggaggtgggtccggcggtggaggaagccaggtccaactccaa |
| | underlined | gaaagcggaccgggtcttgtgaagccatcagaaactctttcactgacttgtactgtgagcggag |
| | | tgtctctccccgattacggggtgtcttggatcagacagccaccggggaagggtctggaatggat |
| | | tggagtgatttggggctctgagactacttactaccaatcatccctcaagtcacgcgtcaccatctc |
| | | aaaggacaactctaagaatcaggtgtcactgaaactgtcatctgtgaccgcagccgacaccgc |
| | | cgtgtactattgcgctaagcattactattatgggggagctacgcaatggattactggggacagg |
| | | gtactctggtcaccgtgtccagcaccactaccccagcaccgaggccacccaccccggctccta |
| | | ccatcgcctcccagcctctgtccctgcgtccggaggcatgtagacccgcagctggtggggcc |
| | | gtgcatacccggggtcttgacttcgcctgcgatatctacatttgggcccctctggctggtacttgc |
| | | ggggtcctgctgctttcactcgtgatcactctttactgtaagcgcggtcggaagaagctgctgtac |
| | | atctttaagcaacccttcatgaggcctgtgcagactactcaagaggaggacggctgttcatgcc |
| | | ggttcccagaggaggaggaaggcggctgcgaactgcgcgtgaaattcagccgcagcgcag |
| | | atgctccagcctaccagcaggggcagaaccagctctacaacgaactcaatcttggtcggagag |
| | | aggagtacgacgtgctggacaagcggagaggacgggacccagaaatgggcgggaagccg |
| | | cgcagaaagaatccccaagagggcctgtacaacgagctccaaaaggataagatggcagaag |
| | | cctatagcgagattggtatgaaaggggaacgcagaagaggcaaaggccacgacggactgta |
| | | ccagggactcagcaccgccaccaaggacacctatgacgctcttcacatgcaggccctgccgc |
| | | ctcggtaa |
| 417 | CAR 2A | gaaattgtgatgacccagtcacccgccactcttagcctttcacccggtgagcgcgcaaccctgt |
| | nucleic acid | cttgcagagcctcccaagacatctcaaaataccttaattggtatcaacagaagcccggacaggc |
| | sequence; | tcctcgccttctgatctaccacaccagccggctccattctggaatccctgccaggttcagcggta |
| | no signal | gcggatctgggaccgactacaccctcactatcagctcactgcagccagaggacttcgctgtcta |
| | peptide; no | tttctgtcagcaagggaacaccctgccctacacctttggacagggcaccaagctcgagattaaa |
| | stop codon | ggtggaggtggcagcggaggaggtgggtccggcggtggaggaagccaggtccaactccaa |
| | | gaaagcggaccgggtcttgtgaagccatcagaaactctttcactgacttgtactgtgagcggag |
| | | tgtctctccccgattacggggtgtcttggatcagacagccaccggggaagggtctggaatggat |
| | | tggagtgatttggggctctgagactacttactaccaatcatccctcaagtcacgcgtcaccatctc |
| | | aaaggacaactctaagaatcaggtgtcactgaaactgtcatctgtgaccgcagccgacaccgc |
| | | cgtgtactattgcgctaagcattactattatggcgggagctacgcaatggattactggggacagg |
| | | gtactctggtcaccgtgtccagcaccactaccccagcaccgaggccacccaccccggctccta |
| | | ccatcgcctcccagcctctgtccctgcgtccggaggcatgtagacccgcagctggtggggcc |
| | | gtgcatacccggggtcttgacttcgcctgcgatatctacatttgggcccctctggctggtacttgc |
| | | ggggtcctgctgctttcactcgtgatcactctttactgtaagcgcggtcggaagaagctgctgtac |
| | | atctttaagcaacccttcatgaggcctgtgcagactactcaagaggaggacggctgttcatgcc |
| | | ggttcccagaggaggaggaaggcggctgcgaactgcgcgtgaaattcagccgcagcgcag |
| | | atgctccagcctaccagcaggggcagaaccagctctacaacgaactcaatcttggtcggagag |
| | | aggagtacgacgtgctggacaagcggagaggacgggacccagaaatgggcgggaagccg |
| | | cgcagaaagaatccccaagagggcctgtacaacgagctccaaaaggataagatggcagaag |
| | | cctatagcgagattggtatgaaaggggaacgcagaagaggcaaaggccacgacggactgta |
| | | ccagggactcagcaccgccaccaaggacacctatgacgctcttcacatgcaggccctgccgc |
| | | ctcgg |
| 250 | Anti-CD19 | QVQLQESGPGLVKPSETLSLTCTVSGVSLPDYGVSWIRQPPG |
| | VH | KGLEWIGVIWGSETTYYQSSLKSRVTISKDNSKNQVSLKLSS |
| | | VTAADTAVYYCAKHYYYGGSYAMDYWGQGTL VTVSS |
| 251 | Anti-CD19 | EIVMTQSPATLSLSPGERATLSCRASQDISKYLNWYQQKPG |
| | VL | QAPRLLIYHTSRLHSGIPARFSGSGSGTDYTLTISSLQPEDFA |
| | | VYFCQQGNTLPYTFGQGTKLEIK |
| 331 | VH | QVQLQESGPGLVKPSETLSLTCTVSGVSLPDYGVSWIRQPPG |
| | | KCLEWIGVIWGSETTYYQSSLKSRVTISKDNSKNQVSLKLSS |
| | | VTAADTAVYYCAKHYYYGGSYAMDYWGQGTL VTVSS |
| 332 | VL | EIVMTQSPATLSLSPGERATLSCRASQDISKYLNWYQQKPG |
| | | QAPRLLIYHTSRLHSGIPARFSGSGSGTDYTLTISSLQPEDFA |
| | | VYFCQQGNTLPYTFGCGTKLEIK |

### Exemplary CD19 CAR A

[0315] In some embodiments, the CD19 CAR is a comprises a binding domain of the FMC63 monoclonal antibody-derived single-chain variable fragment (scFv), IgG4 hinge region, CD28 transmembrane domain, 4-1BB (CD137) costimulatory domain, and CD3 zeta activation domain. In some embodiments, the CD19 CAR is encoded by a nucleotide sequence of Table 25, or a nucleotide sequence having at least 80%, 85%, 90%, 95%, 97%, or 100% or no more than 20, 15, 10, 8, 5, 4, 3, 2, or 1 variations thereto. In some embodiments, the CD19 CAR comprises a polypeptide encoded by a nucleotide sequence of Table 25, or a nucleotide sequence having at least 80%, 85%, 90%, 95%, 97%, or 100% or no more than 20, 15, 10, 8, 5, 4, 3, 2, or 1 variations thereto. In some embodiments, the CD19 CAR comprises a polypeptide sequence of Table 25, or a polypeptide sequence having at least 80%, 85%, 90%, 95%, 97%, or 100% or no more than 20, 15, 10, 8, 5, 4, 3, 2, or 1 variations thereto. In some embodiments, the CD19 CAR comprises a heavy chain CDR1-3 and a light chain CDR1-3, of a sequence of Table 25. In some embodiments, the CD19 CAR comprises a heavy chain CDR1-3 and a light chain CDR1-3, of a sequence of Table 25 according to Kabat. In some embodiments, the CD19 CAR comprises a heavy chain CDR1-3 and a light chain CDR1-3, of a sequence of Table 25 according to Chothia. In some embodiments, the CD19 CAR comprises a heavy chain CDR1-3 of a sequence of Table 25. In some embodiments, the CD19 CAR comprises a heavy chain CDR1-3 of a sequence of Table 25 according to Kabat. In some embodiments, the CD19 CAR comprises a heavy chain CDR1-3 of a sequence of Table 25 according to Chothia. In some embodiments, the CD19 CAR comprises a light chain CDR1-3 of a sequence of Table 25. In some embodiments, the CD19 CAR comprises a light chain CDR1-3 of a sequence of Table 25 according to Kabat. In some embodiments, the CD19 CAR comprises a light chain CDR1-3 of a sequence of Table 25 according to Chothia.

TABLE 25
Amino acid and nucleic acid sequences of an exemplary CD19 CAR

| SEQ ID NO: | Description | Sequence |
|---|---|---|
| 357 | CAR A full | atgcttctcctggtgacaagccttctgctctgtgagttaccacaccca |
| | nucleotide | gcattcctcctgatcccagacatccagatgacacagactacatcctcc |
| | sequence; | ctgtctgcctctctgggagacagagtcaccatcagttgcagggcaagt |
| | with leader | caggacattagtaaatatttaaattggtatcagcagaaaccagatgga |
| | | actgttaaactcctgatctaccatacatcaagattacactcaggagtc |
| | | ccatcaaggttcagtggcagtgggtctggaacagattattctctcacc |
| | | attagcaacctggagcaagaagatattgccacttacttttgccaacag |
| | | ggtaatacgcttccgtacacgttcggaggggggactaagttggaaata |
| | | acaggctccacctctggatccggcaagcccggatctggcgagggatcc |
| | | accaagggcgaggtgaaactgcaggagtcaggacctggcctggtggcg |
| | | ccctcacagagcctgtccgtcacatgcactgtctcaggggtctcatta |
| | | cccgactatggtgtaagctggattcgccagcctccacgaaagggtctg |
| | | gagtggctgggagtaatatggggtagtgaaaccacatactataattca |
| | | gctctcaaatccagactgaccatcatcaaggacaactccaagagccaa |
| | | gttttcttaaaaatgaacagtctgcaaactgatgacacagccatttac |
| | | tactgtgccaaacattattactacggtggtagctatgctatggactac |
| | | tggggtcaaggaacctcagtcaccgtctcctcagcggccgcaattgaa |
| | | gttatgtatcctcctccttacctagacaatgagaagagcaatggaacc |
| | | attatccatgtgaaagggaaacacctttgtccaagtcccctatttccc |
| | | ggaccttctaagcccttttgggtgctggtggtggttgggggagtcctg |
| | | gcttgctatagcttgctagtaacagtggcctttattattttctgggtg |
| | | aggagtaagaggagcaggctcctgcacagtgactacatgaacatgact |
| | | ccccgccgccccgggcccacccgcaagcattaccagccctatgcccca |
| | | ccacgcgacttcgcagcctatcgctccagagtgaagttcagcaggagc |
| | | gcagacgcccccgcgtaccagcagggccagaaccagctctataacgag |
| | | ctcaatctaggacgaagagaggagtacgatgttttggacaagagacgt |
| | | ggccgggaccctgagatggggggaaagccgagaaggaagaaccctcag |
| | | gaaggcctgtacaatgaactgcagaaagataagatggcggaggcctac |
| | | agtgagattgggatgaaaggcgagcgccggaggggcaaggggcacgat |
| | | ggcctttaccagggtctcagtacagccaccaaggacacctacgacgcc |
| | | cttcacatgcaggccctgccccctcgc |
| 358 | CAR A-full | MLLLVTSLLLCELPHPAFLLIPDIQMTQTTSSLSASLGDRVTISCRAS |
| | amino acid | QDISKYLNWYQQKPDGTVKLLIYHTSRLHSGVPSRFSGSGSGTDYSLT |
| | transgene | ISNLEQEDIATYFCQQGNTLPYTFGGGTKLEITGSTSGSGKPGSGEGS |
| | sequence; | TKGEVKLQESGPGLVAPSQSLSVTCTVSGVSLPDYGVSWIRQPPRKGL |
| | with leader | EWLGVIWGSETTYYNSALKSRLTIIKDNSKSQVFLKMNSLQTDDTAIY |
| | | YCAKHYYYGGSYAMDYWGQGTSVTVSSAAAIEVMYPPPYLDNEKSNGT |
| | | IIHVKGKHLCPSPLFPGPSKPFWVLVVVGGVLACYSLLVTVAFIIFWV |
| | | RSKRSRLLHSDYMNMTPRRPGPTRKHYQPYAPPRDFAAYRSRVKFSRS |
| | | ADAPAYQQGQNQLYNELNLGRREEYDVLDKRRGRDPEMGGKPRRKNPQ |
| | | EGLYNELQKDKMAEAYSEIGMKGERRRGKGHDGLYQGLSTATKDTYDA |
| | | LHMQALPPR |
| 359 | CAR A- | atgcttctcctggtgacaagccttctgctctgtgagttaccacaccca |
| | CD19 scFv | gcattcctcctgatcccagacatccagatgacacagactacatcctcc |
| | nucleotide | ctgtctgcctctctgggagacagagtcaccatcagttgcagggcaagt |
| | sequence | caggacattagtaaatatttaaattggtatcagcagaaaccagatgga |
| | with leader | actgttaaactcctgatctaccatacatcaagattacactcaggagtc |
| | | ccatcaaggttcagtggcagtgggtctggaacagattattctctcacc |
| | | attagcaacctggagcaagaagatattgccacttacttttgccaacag |
| | | ggtaatacgcttccgtacacgttcggaggggggactaagttggaaata |
| | | acaggctccacctctggatccggcaagcccggatctggcgagggatcc |
| | | accaagggcgaggtgaaactgcaggagtcaggacctggcctggtggcg |
| | | ccctcacagagcctgtccgtcacatgcactgtctcaggggtctcatta |
| | | cccgactatggtgtaagctggattcgccagcctccacgaaagggtctg |
| | | gagtggctgggagtaatatggggtagtgaaaccacatactataattca |
| | | gctctcaaatccagactgaccatcatcaaggacaactccaagagccaa |
| | | gttttcttaaaaatgaacagtctgcaaactgatgacacagccatttac |
| | | tactgtgccaaacattattactacggtggtagctatgctatggactac |
| | | tggggtcaaggaacctcagtcaccgtctcctca |
| 360 | CAR A- | MLLLVTSLLLCELPHPAFLLIPDIQMTQTTSSLSASLGDRVTISCRAS |
| | CD19 scFv | QDISKYLNWYQQKPDGTVKLLIYHTSRLHSGVPSRFSGSGSGTDYSLT |
| | amino acid | ISNLEQEDIATYFCQQGNTLPYTFGGGTKLEITGSTSGSGKPGSGEGS |
| | sequence; | TKGEVKLQESGPGLVAPSQSLSVTCTVSGVSLPDYGVSWIRQPPRKGL |
| | with leader | EWLGVIWGSETTYYNSALKSRLTIIKDNSKSQVFLKMNSLQTDDTAIY |
| | | YCAKHYYYGGSYAMDYWGQGTSVTVS |
| 361 | CAR A-full | gacatccagatgacacagactacatcctccctgtctgcctctctggga |
| | nucleotide | gacagagtcaccatcagttgcagggcaagtcaggacattagtaaatat |
| | sequence; | ttaaattggtatcagcagaaaccagatggaactgttaaactcctgatc |
| | no leader | taccatacatcaagattacactcaggagtcccatcaaggttcagtggc |
| | | agtgggtctggaacagattattctctcaccattagcaacctggagcaa |
| | | gaagatattgccacttacttttgccaacagggtaatacgcttccgtac |
| | | acgttcggaggggggactaagttggaaataacaggctccacctctgga |
| | | tccggcaagcccggatctggcgagggatccaccaagggcgaggtgaaa |
| | | ctgcaggagtcaggacctggcctggtggcgccctcacagagcctgtcc |
| | | gtcacatgcactgtctcaggggtctcattacccgactatggtgtaagc |
| | | tggattcgccagcctccacgaaagggtctggagtggctgggagtaata |
| | | tggggtagtgaaaccacatactataattcagctctcaaatccagactg |
| | | accatcatcaaggacaactccaagagccaagttttcttaaaaatgaac |
| | | agtctgcaaactgatgacacagccatttactactgtgccaaacattat |
| | | tactacggtggtagctatgctatggactactggggtcaaggaacctca |
| | | gtcaccgtctcctcagcggccgcaattgaagttatgtatcctcctcct |
| | | tacctagacaatgagaagagcaatggaaccattatccatgtgaaaggg |
| | | aaacacctttgtccaagtcccctatttcccggaccttctaagcccttt |
| | | tgggtgctggtggtggttgggggagtcctggcttgctatagcttgcta |
| | | gtaacagtggcctttattattttctgggtgaggagtaagaggagcagg |
| | | ctcctgcacagtgactacatgaacatgactccccgccgccccgggccc |
| | | acccgcaagcattaccagccctatgccccaccacgcgacttcgcagcc |
| | | tatcgctccagagtgaagttcagcaggagcgcagacgcccccgcgtac |
| | | cagcagggccagaaccagctctataacgagctcaatctaggacgaaga |
| | | gaggagtacgatgttttggacaagagacgtggccgggaccctgagatg |
| | | gggggaaagccgagaaggaagaaccctcaggaaggcctgtacaatgaa |
| | | ctgcagaaagataagatggcggaggcctacagtgagattgggatgaaa |
| | | ggcgagcgccggaggggcaaggggcacgatggcctttaccagggtctc |
| | | agtacagccaccaaggacacctacgacgcccttcacatgcaggccctg |
| | | ccccctcgc |
| 362 | CAR A-full | DIQMTQTTSSLSASLGDRVTISCRASQDISKYLNWYQQKPDGTVKLLI |
| | amino acid | YHTSRLHSGVPSRFSGSGSGTDYSLTISNLEQEDIATYFCQQGNTLPY |
| | transgene | TFGGGTKLEITGSTSGSGKPGSGEGSTKGEVKLQESGPGLVAPSQSLS |
| | sequence; | VTCTVSGVSLPDYGVSWIRQPPRKGLEWLGVIWGSETTYYNSALKSRL |
| | no leader | TIIKDNSKSQVFLKMNSLQTDDTAIYYCAKHYYYGGSYAMDYWGQGTS |
| | | VTVSSAAAIEVMYPPPYLDNEKSNGTIIHVKGKHLCPSPLFPGPSKPF |
| | | WVLVVVGGVLACYSLLVTVAFIIFWVRSKRSRLLHSDYMNMTPRRPGP |
| | | TRKHYQPYAPPRDFAAYRSRVKFSRSADAPAYQQGQNQLYNELNLGRR |
| | | EEYDVLDKRRGRDPEMGGKPRRKNPQEGLYNELQKDKMAEAYSEIGMK |
| | | GERRRGKGHDGLYQGLSTATKDTYDALHMQALPPR |
| 363 | CAR A- | gacatccagatgacacagactacatcctccctgtctgcctctctggga |
| | CD19 scFv | gacagagtcaccatcagttgcagggcaagtcaggacattagtaaatat |
| | nucleotide; | ttaaattggtatcagcagaaaccagatggaactgttaaactcctgatc |
| | no leader | taccatacatcaagattacactcaggagtcccatcaaggttcagtggc |
| | | agtgggtctggaacagattattctctcaccattagcaacctggagcaa |
| | | gaagatattgccacttacttttgccaacagggtaatacgcttccgtac |
| | | acgttcggaggggggactaagttggaaataacaggctccacctctgga |
| | | tccggcaagcccggatctggcgagggatccaccaagggcgaggtgaaa |
| | | ctgcaggagtcaggacctggcctggtggcgccctcacagagcctgtcc |
| | | gtcacatgcactgtctcaggggtctcattacccgactatggtgtaagc |
| | | tggattcgccagcctccacgaaagggtctggagtggctgggagtaata |
| | | tggggtagtgaaaccacatactataattcagctctcaaatccagactg |
| | | accatcatcaaggacaactccaagagccaagttttcttaaaaatgaac |
| | | agtctgcaaactgatgacacagccatttactactgtgccaaacattat |
| | | tactacggtggtagctatgctatggactactggggtcaaggaacctca |
| | | gtcaccgtctcctca |
| 364 | CAR A- | DIQMTQTTSSLSASLGDRVTISCRASQDISKYLNWYQQKPDGTVKLLI |
| | CD19 scFv | YHTSRLHSGVPSRFSGSGSGTDYSLTISNLEQEDIATYFCQQGNTLPY |
| | amino acid | TFGGGTKLEITGSTSGSGKPGSGEGSTKGEVKLQESGPGLVAPSQSLS |
| | sequence; | VTCTVSGVSLPDYGVSWIRQPPRKGLEWLGVIWGSETTYYNSALKSRL |
| | no leader | TIIKDNSKSQVFLKMNSLQTDDTAIYYCAKHYYYGGSYAMDYWGQGTS |
| | | VTVSS |

### Exemplary CD19 CAR B

[0316] In some embodiments, the CD19 CAR comprises a murine anti-CD19 single-chain variable fragment (scFv) linked to CD28 and CD3-zeta co-stimulatory domains. In certain embodiments, the anti-CD19 single-chain variable fragment comprises the FMC63 antibody (e.g., the antibody described in Nicholson et al., Molecular Immunology, 34(16-17):1157-1165, 1997; the entire contents of which are incorporated herein by reference). In some embodiments, the CD19 CAR is encoded by a nucleotide sequence of Table 26, or a nucleotide sequence having at least 80%, 85%, 90%, 95%, 97%, or 100% or no more than 20, 15, 10, 8, 5, 4, 3, 2, or 1 variations thereto. In some embodiments, the CD19 CAR comprises a polypeptide encoded by a nucleotide sequence of Table 26, or a nucleotide sequence having at least 80%, 85%, 90%, 95%, 97%, or 100% or no more than 20, 15, 10, 8, 5, 4, 3, 2, or 1 variations thereto. In some embodiments, the CD19 CAR comprises a polypeptide sequence of Table 26, or a polypeptide sequence having at least 80%, 85%, 90%, 95%, 97%, or 100% or no more than 20, 15, 10, 8, 5, 4, 3, 2, or 1 variations thereto. In some embodiments, the CD19 CAR comprises a heavy chain CDR1-3 and a light chain CDR1-3, of a sequence of Table 26. In some embodiments, the CD19 CAR comprises a heavy chain CDR1-3 and a light chain CDR1-3, of a sequence of Table 26 according to Kabat. In some embodiments, the CD19 CAR comprises a heavy chain CDR1-3 and a light chain CDR1-3, of a sequence of Table 26 according to Chothia. In some embodiments, the CD19 CAR comprises a heavy chain CDR1-3 of a sequence of Table 26. In some embodiments, the CD19 CAR comprises a heavy chain CDR1-3 of a sequence of Table 26 according to Kabat. In some embodiments, the CD19 CAR comprises a heavy chain CDR1-3 of a sequence of Table 26 according to Chothia. In some embodiments, the CD19 CAR comprises a light chain CDR1-3 of a sequence of Table 26. In some embodiments, the CD19 CAR comprises a light chain CDR1-3 of a sequence of Table 26 according to Kabat. In some embodiments, the CD19 CAR comprises a light chain CDR1-3 of a sequence of Table 26 according to Chothia.

TABLE 26
Amino acid and nucleic acid sequences of an exemplary CD19 CAR

| SEQ ID NO: | Description | Sequence |
|---|---|---|
| 365 | Exemplary | MLLLVTSLLLCELPHPAFLLIPDIQMTQTTSSLSASLGDRVTISCR |
| | CD19 CAR | ASQDISKYLNWYQQKPDGTVKLLIYHTSRLHSGVPSRFSGSGSGTD |
| | Protein | YSLTISNLEQEDIATYFCQQGNTLPYTFGGGTKLEITGSTSGSGKP |
| | Sequence | GSGEGSTKGEVKLQESGPGLVAPSQSLSVTCTVSGVSLPDYGVSWI |
| | | RQPPRKGLEWLGVIWGSETTYYNSALKSRLTIIKDNSKSQVFLKMN |
| | | SLQTDDTAIYYCAKHYYYGGSYAMDYWGQGTSVTVSSFVPVFLPAK |
| | | PTTTPAPRPPTPAPTIASQPLSLRPEACRPAAGGAVHTRGLDFACD |
| | | IYIWAPLAGTCGVLLLSLVITLYCNHRNRSKRSRLLHSDYMNMTPR |
| | | RPGPTRKHYQPYAPPRDFAAYRSRVKFSRSADAPAYQQGQNQLYNE |
| | | LNLGRREEYDVLDKRRGRDPEMGGKPRRKNPQEGLYNELQKDKMAE |
| | | AYSEIGMKGERRRGKGHDGLYQGLSTATKDTYDALHMQALPPR |
| 366 | Exemplary | ATGCTTCTCCTGGTGACAAGCCTTCTGCTCTGTGAGTTACCA |
| | CD19 CAR | CACCCAGCATTCCTCCTGATCCCAGACATCCAGATGACACAG |
| | Nucleic | ACTACATCCTCCCTGTCTGCCTCTCTGGGAGACAGAGTCACC |
| | Acid | ATCAGTTGCAGGGCAAGTCAGGACATTAGTAAATATTTAAAT |
| | Sequence | TGGTATCAGCAGAAACCAGATGGAACTGTTAAACTCCTGATC |
| | | TACCATACATCAAGATTACACTCAGGAGTCCCATCAAGGTTC |
| | | AGTGGCAGTGGGTCTGGAACAGATTATTCTCTCACCATTAGC |
| | | AACCTGGAGCAAGAAGATATTGCCACTTACTTTTGCCAACAG |
| | | GGTAATACGCTTCCGTACACGTTCGGAGGGGGGACTAAGTTG |
| | | GAAATAACAGGCTCCACCTCTGGATCCGGCAAGCCCGGATCT |
| | | GGCGAGGGATCCACCAAGGGCGAGGTGAAACTGCAGGAGTCA |
| | | GGACCTGGCCTGGTGGCGCCCTCACAGAGCCTGTCCGTCACA |
| | | TGCACTGTCTCAGGAGGGTCTGGAGGTCTCATTACCCGACTA |
| | | TGGTGTAAGCTGGATTCGCCAGCCTCCACGAAGTGGCTGGGA |
| | | GTAATATGGGGTAGTGAAACCACATACTATAATTCAGCTCTC |
| | | AAATCCAGACTGACCATCATCAAGGACAACTCCAAGAGCCAA |
| | | GTTTTCTTAAAAATGAACAGTCTGCAAACTGATGACACAGCC |
| | | ATTTACTACTGTGCCAAACATTATTACTACGGTGGTAGCTAT |
| | | GCTATGGACTACTGGGGTCAAGGAACCTCAGTCACCGTCTCC |
| | | TCAGCGGCCGCAATTGAAGTTATGTATCCTCCTCCTTACCTA |
| | | GACAATGAGAAGAGCAATGGAACCATTATCCATGTGAAAGGG |
| | | AAACACCTTTGTCCAAGTCCCCTATTTCCCGGACCTTCTAAG |
| | | CCCTTTTGGGTGCTGGTGGTGGTTGGGGGAGTCCTGGCTTGC |
| | | TATAGCTTGCTAGTAACAGTGGCCTTTATTATTTTCTGGGTG |
| | | AGGAGTAAGAGGAGCAGGCTCCTGCACAGTGACTACATGAAC |
| | | ATGACTCCCCGCCGCCCCGGGCCCACCCGCAAGCATTACCAG |
| | | CCCTATGCCCCACCACGCGACTTCGCAGCCTATCGCTCCAGA |
| | | GTGAAGTTCAGCAGGAGCGCAGACGCCCCCGCGTACCAGCAG |
| | | GGCCAGAACCAGCTCTATAACGAGCTCAATCTAGGACGAAGA |
| | | GAGGAGTACGATGTTTTGGACAAGAGACGTGGCCGGGACCCT |
| | | GAGATGGGGGGAAAGCCGAGAAGGAAGAACCCTCAGGAAGGC |
| | | CTGTACAATGAACTGCAGAAAGATAAGATGGCGGAGGCCTAC |
| | | AGTGAGATTGGGATGAAAGGCGAGCGCCGGAGGGGCAAGGGG |
| | | CACGATGGCCTTTACCAGGGTCTCAGTACAGCCACCAAGGAC |
| | | ACCTACGACGCCCTTCACATGCAGGCCCTGCCCCCTCGC |

### Exemplary CD19 CAR C

[0317] In some embodiments, the CD19 CAR comprises a murine anti-CD19 single chain variable fragment (scFv) linked to CD28 and CD3-zeta co-stimulatory domains. In some embodiments, the CD19 CAR is encoded by a nucleotide sequence of Table 27, or a nucleotide sequence having at least 80%, 85%, 90%, 95%, 97%, or 100% or no more than 20, 15, 10, 8, 5, 4, 3, 2, or 1 variations thereto. In some embodiments, the CD19 CAR comprises a polypeptide encoded by a nucleotide sequence of Table 27, or a nucleotide sequence having at least 80%, 85%, 90%, 95%, 97%, or 100% or no more than 20, 15, 10, 8, 5, 4, 3, 2, or 1 variations thereto. In some embodiments, the CD19 CAR comprises a polypeptide sequence of Table 27, or a polypeptide sequence having at least 80%, 85%, 90%, 95%, 97%, or 100% or no more than 20, 15, 10, 8, 5, 4, 3, 2, or 1 variations thereto. In some embodiments, the CD19 CAR comprises a heavy chain CDR1-3 and a light chain CDR1-3, of a sequence of Table 27. In some embodiments, the CD19 CAR comprises a heavy chain CDR1-3 and a light chain CDR1-3, of a sequence of Table 27 according to Kabat. In some embodiments, the CD19 CAR comprises a heavy chain CDR1-3 and a light chain CDR1-3, of a sequence of Table 27 according to Chothia. In some embodiments, the CD19 CAR comprises a heavy chain CDR1-3 of a sequence of Table 27. In some embodiments, the CD19 CAR comprises a heavy chain CDR1-3 of a sequence of Table 27 according to Kabat. In some embodiments, the CD19 CAR comprises a heavy chain CDR1-3 of a sequence of Table 27 according to Chothia. In some embodiments, the CD19 CAR comprises a light chain CDR1-3 of a sequence of Table 27. In some embodiments, the CD19 CAR comprises a light chain CDR1-3 of a sequence of Table 27 according to Kabat. In some embodiments, the CD19 CAR comprises a light chain CDR1-3 of a sequence of Table 27 according to Chothia.

TABLE 27
Amino acid and nucleic acid sequences of an exemplary CD19 CAR

| SEQ ID NO: | Description | Sequence |
|---|---|---|
| 367 | CAR C-full | ATGCTGCTGCTGGTGACCAGCCTGCTGCTGTGCGAGCTGCCCCACCCCGC |
| | nucleotide | CTTTCTGCTGATCCCCGACATCCAGATGACCCAGACCACCTCCAGCCTGA |
| | sequence; | GCGCCAGCCTGGGCGACCGGGTGACCATCAGCTGCCGGGCCAGCCAGGAC |
| | with leader | ATCAGCAAGTACCTGAACTGGTATCAGCAGAAGCCCGACGGCACCGTCAA |
| | | GCTGCTGATCTACCACACCAGCCGGCTGCACAGCGGCGTGCCCAGCCGGT |
| | | TTAGCGGCAGCGGCTCCGGCACCGACTACAGCCTGACCATCTCCAACCTG |
| | | GAACAGGAAGATATCGCCACCTACTTTTGCCAGCAGGGCAACACACTGCC |
| | | CTACACCTTTGGCGGCGGAACAAAGCTGGAAATCACCGGCAGCACCTCCG |
| | | GCAGCGGCAAGCCTGGCAGCGGCGAGGGCAGCACCAAGGGCGAGGTGAAG |
| | | CTGCAGGAAAGCGGCCCTGGCCTGGTGGCCCCCAGCCAGAGCCTGAGCGT |
| | | GACCTGCACCGTGAGCGGCGTGAGCCTGCCCGACTACGGCGTGAGCTGGA |
| | | TCCGGCAGCCCCCCAGGAAGGGCCTGGAATGGCTGGGCGTGATCTGGGGC |
| | | AGCGAGACCACCTACTACAACAGCGCCCTGAAGAGCCGGCTGACCATCAT |
| | | CAAGGACAACAGCAAGAGCCAGGTGTTCCTGAAGATGAACAGCCTGCAGA |
| | | CCGACGACACCGCCATCTACTACTGCGCCAAGCACTACTACTACGGCGGC |
| | | AGCTACGCCATGGACTACTGGGGCCAGGGCACCAGCGTGACCGTGAGCAG |
| | | CGAATCTAAGTACGGACCGCCCTGCCCCCCTTGCCCTATGTTCTGGGTGC |
| | | TGGTGGTGGTCGGAGGCGTGCTGGCCTGCTACAGCCTGCTGGTCACCGTG |
| | | GCCTTCATCATCTTTTGGGTGAAACGGGGCAGAAAGAAACTCCTGTATAT |
| | | ATTCAAACAACCATTTATGAGACCAGTACAAACTACTCAAGAGGAAGATG |
| | | GCTGTAGCTGCCGATTTCCAGAAGAAGAAGAAGGAGGATGTGAACTGCGG |
| | | GTGAAGTTCAGCAGAAGCGCCGACGCCCCTGCCTACCAGCAGGGCCAGAA |
| | | TCAGCTGTACAACGAGCTGAACCTGGGCAGAAGGGAAGAGTACGACGTCC |
| | | TGGATAAGCGGAGAGGCCGGGACCCTGAGATGGGCGGCAAGCCTCGGCGG |
| | | AAGAACCCCCAGGAAGGCCTGTATAACGAACTGCAGAAAGACAAGATGGC |
| | | CGAGGCCTACAGCGAGATCGGCATGAAGGGCGAGCGGAGGCGGGGCAAGG |
| | | GCCACGACGGCCTGTATCAGGGCCTGTCCACCGCCACCAAGGATACCTAC |
| | | GACGCCCTGCACATGCAGGCCCTGCCCCCAAGG |
| 368 | CAR C-full | MLLLVTSLLLCELPHPAFLLIPDIQMTQTTSSLSASLGDRVTISCRASQD |
| | transgene | ISKYLNWYQQKPDGTVKLLIYHTSRLHSGVPSRFSGSGSGTDYSLTISNL |
| | amino acid | EQEDIATYFCQQGNTLPYTFGGGTKLEITGSTSGSGKPGSGEGSTKGEVK |
| | sequence; | LQESGPGLVAPSQSLSVTCTVSGVSLPDYGVSWIRQPPRKGLEWLGVIWG |
| | with leader | SETTYYNSALKSRLTIIKDNSKSQVFLKMNSLQTDDTAIYYCAKHYYYGG |
| | | SYAMDYWGQGTSVTVSSESKYGPPCPPCPMFWVLVVVGGVLACYSLLVTV |
| | | AFIIFWVKRGRKKLLYIFKQPFMRPVQTTQEEDGCCRFPEEEEGGCELR |
| | | VKFSRSADAPAYQQGQNQLYNELNLGRREEYDVLDKRRGRDPEMGGKPRR |
| | | KNPQEGLYNELQKDKMAEAYSEIGMKGERRRGKGHDGLYQGLSTATKDTY |
| | | DALHMQALPPR |
| 369 | CAR C- | ATGCTGCTGCTGGTGACCAGCCTGCTGCTGTGCGAGCTGCCCCACCCCGC |
| | CD 19 scFv | CTTTCTGCTGATCCCCGACATCCAGATGACCCAGACCACCTCCAGCCTGA |
| | nucleotide | GCGCCAGCCTGGGCGACCGGGTGACCATCAGCTGCCGGGCCAGCCAGGAC |
| | sequence; | ATCAGCAAGTACCTGAACTGGTATCAGCAGAAGCCCGACGGCACCGTCAA |
| | with leader | GCTGCTGATCTACCACACCAGCCGGCTGCACAGCGGCGTGCCCAGCCGGT |
| | | TTAGCGGCAGCGGCTCCGGCACCGACTACAGCCTGACCATCTCCAACCTG |
| | | GAACAGGAAGATATCGCCACCTACTTTTGCCAGCAGGGCAACACACTGCC |
| | | CTACACCTTTGGCGGCGGAACAAAGCTGGAAATCACCGGCAGCACCTCCG |
| | | GCAGCGGCAAGCCTGGCAGCGGCGAGGGCAGCACCAAGGGCGAGGTGAAG |
| | | CTGCAGGAAAGCGGCCCTGGCCTGGTGGCCCCCAGCCAGAGCCTGAGCGT |
| | | GACCTGCACCGTGAGCGGCGTGAGCCTGCCCGACTACGGCGTGAGCTGGA |
| | | TCCGGCAGCCCCCCAGGAAGGGCCTGGAATGGCTGGGCGTGATCTGGGGC |
| | | AGCGAGACCACCTACTACAACAGCGCCCTGAAGAGCCGGCTGACCATCAT |
| | | CAAGGACAACAGCAAGAGCCAGGTGTTCCTGAAGATGAACAGCCTGCAGA |
| | | CCGACGACACCGCCATCTACTACTGCGCCAAGCACTACTACTACGGCGGC |
| | | AGCTACGCCATGGACTACTGGGGCCAGGGCACCAGCGTGACCGTGAGCAG |
| | | C |
| 370 | CAR C- | MLLLVTSLLLCELPHPAFLLIPDIQMTQTTSSLSASLGDRVTISCRASQD |
| | CD19 scFv | ISKYLNWYQQKPDGTVKLLIYHTSRLHSGVPSRFSGSGSGTDYSLTISNL |
| | amino acid | EQEDIATYFCQQGNTLPYTFGGGTKLEITGSTSGSGKPGSGEGSTKGEVK |
| | sequence; | LQESGPGLVAPSQSLSVTCTVSGVSLPDYGVSWIRQPPRKGLEWLGVIWG |
| | with leader | SETTYYNSALKSRLTIIKDNSKSQVFLKMNSLQTDDTAIYYCAKHYYYGG |
| | | SYAMDYWGQGTSVTVSS |
| 371 | CAR C-full | GACATCCAGATGACCCAGACCACCTCCAGCCTGAGCGCCAGCCTGGGCGA |
| | nucleotide | CCGGGTGACCATCAGCTGCCGGGCCAGCCAGGACATCAGCAAGTACCTGA |
| | sequence; | ACTGGTATCAGCAGAAGCCCGACGGCACCGTCAAGCTGCTGATCTACCAC |
| | no leader | ACCAGCCGGCTGCACAGCGGCGTGCCCAGCCGGTTTAGCGGCAGCGGCTC |
| | | CGGCACCGACTACAGCCTGACCATCTCCAACCTGGAACAGGAAGATATCG |
| | | CCACCTACTTTTGCCAGCAGGGCAACACACTGCCCTACACCTTTGGCGGC |
| | | GGAACAAAGCTGGAAATCACCGGCAGCACCTCCGGCAGCGGCAAGCCTGG |
| | | CAGCGGCGAGGGCAGCACCAAGGGCGAGGTGAAGCTGCAGGAAAGCGGCC |
| | | CTGGCCTGGTGGCCCCCAGCCAGAGCCTGAGCGTGACCTGCACCGTGAGC |
| | | GGCGTGAGCCTGCCCGACTACGGCGTGAGCTGGATCCGGCAGCCCCCCAG |
| | | GAAGGGCCTGGAATGGCTGGGCGTGATCTGGGGCAGCGAGACCACCTACT |
| | | ACAACAGCGCCCTGAAGAGCCGGCTGACCATCATCAAGGACAACAGCAAG |
| | | AGCCAGGTGTTCCTGAAGATGAACAGCCTGCAGACCGACGACACCGCCAT |
| | | CTACTACTGCGCCAAGCACTACTACTACGGCGGCAGCTACGCCATGGACT |
| | | ACTGGGGCCAGGGCACCAGCGTGACCGTGAGCAGCGAATCTAAGTACGGA |
| | | CCGCCCTGCCCCCCTTGCCCTATGTTCTGGGTGCTGGTGGTGGTCGGAGG |
| | | CGTGCTGGCCTGCTACAGCCTGCTGGTCACCGTGGCCTTCATCATCTTTT |
| | | GGGTGAAACGGGGCAGAAAGAAACTCCTGTATATATTCAAACAACCATTT |
| | | ATGAGACCAGTACAAACTACTCAAGAGGAAGATGGCTGTAGCTGCCGATT |
| | | TCCAGAAGAAGAAGAAGGAGGATGTGAACTGCGGGTGAAGTTCAGCAGAA |
| | | GCGCCGACGCCCCTGCCTACCAGCAGGGCCAGAATCAGCTGTACAACGAG |
| | | CTGAACCTGGGCAGAAGGGAAGAGTACGACGTCCTGGATAAGCGGAGAGG |
| | | CCGGGACCCTGAGATGGGCGGCAAGCCTCGGCGGAAGAACCCCCAGGAAG |
| | | GCCTGTATAACGAACTGCAGAAAGACAAGATGGCCGAGGCCTACAGCGAG |
| | | ATCGGCATGAAGGGCGAGCGGAGGCGGGGCAAGGGCCACGACGGCCTGTA |
| | | TCAGGGCCTGTCCACCGCCACCAAGGATACCTACGACGCCCTGCACATGC |
| | | AGGCCCTGCCCCCAAGG |
| 372 | CAR C-full | DIQMTQTTSSLSASLGDRVTISCRASQDISKYLNWYQQKPDGTVKLLIYH |
| | amino acid | TSRLHSGVPSRFSGSGSGTDYSLTISNLEQEDIATYFCQQGNTLPYTFGG |
| | transgene | GTKLEITGSTSGSGKPGSGEGSTKGEVKLQESGPGLVAPSQSLSVTCTVS |
| | sequence; | GVSLPDYGVSWIRQPPRKGLEWLGVIWGSETTYYNSALKSRLTIIKDNSK |
| | no leader | SQVFLKMNSLQTDDTAIYYCAKHYYYGGSYAMDYWGQGTSVTVSSESKYG |
| | | PPCPPCPMFWVLVVVGGVLACYSLLVTVAFIIFWVKRGRKKLLYIFKQPF |
| | | MRPVQTTQEEDGCSCRFPEEEEGGCELRVKFSRSADAPAYQQGQNQLYNE |
| | | LNLGRREEYDVLDKRRGRDPEMGGKPRRKNPQEGLYNELQKDKMAEAYSE |
| | | IGMKGERRRGKGHDGLYQGLSTATKDTYDALHMQALPPR |
| 373 | CAR C- | GACATCCAGATGACCCAGACCACCTCCAGCCTGAGCGCCAGCCTGGGCGA |
| | CD19 scFv | CCGGGTGACCATCAGCTGCCGGGCCAGCCAGGACATCAGCAAGTACCTGA |
| | sequence; | ACTGGTATCAGCAGAAGCCCGACGGCACCGTCAAGCTGCTGATCTACCAC |
| | no leader | ACCAGCCGGCTGCACAGCGGCGTGCCCAGCCGGTTTAGCGGCAGCGGCTC |
| | | CGGCACCGACTACAGCCTGACCATCTCCAACCTGGAACAGGAAGATATCG |
| | | CCACCTACTTTTGCCAGCAGGGCAACACACTGCCCTACACCTTTGGCGGC |
| | | GGAACAAAGCTGGAAATCACCGGCAGCACCTCCGGCAGCGGCAAGCCTGG |
| | | CAGCGGCGAGGGCAGCACCAAGGGCGAGGTGAAGCTGCAGGAAAGCGGCC |
| | | CTGGCCTGGTGGCCCCCAGCCAGAGCCTGAGCGTGACCTGCACCGTGAGC |
| | | GGCGTGAGCCTGCCCGACTACGGCGTGAGCTGGATCCGGCAGCCCCCCAG |
| | | GAAGGGCCTGGAATGGCTGGGCGTGATCTGGGGCAGCGAGACCACCTACT |
| | | ACAACAGCGCCCTGAAGAGCCGGCTGACCATCATCAAGGACAACAGCAAG |
| | | AGCCAGGTGTTCCTGAAGATGAACAGCCTGCAGACCGACGACACCGCCAT |
| | | CTACTACTGCGCCAAGCACTACTACTACGGCGGCAGCTACGCCATGGACT |
| | | ACTGGGGCCAGGGCACCAGCGTGACCGTGAGCAGC |
| 374 | CAR C- | DIQMTQTTSSLSASLGDRVTISCRASQDISKYLNWYQQKPDGTVKLLIYH |
| | CD19 scFv | TSRLHSGVPSRFSGSGSGTDYSLTISNLEQEDIATYFCQQGNTLPYTFGG |
| | sequence; | GTKLEITGSTSGSGKPGSGEGSTKGEVKLQESGPGLVAPSQSLSVTCTVS |
| | no leader | GVSLPDYGVSWIRQPPRKGLEWLGVIWGSETTYYNSALKSRLTIIKDNSK |
| | | SQVFLKMNSLQTDDTAIYYCAKHYYYGGSYAMDYWGQGTSVTVSS |

### Exemplary CD19 CAR F

[0318] In some embodiments, the CD19 CAR is encoded by a nucleotide sequence of Table 27, or a nucleotide sequence having at least 80%, 85%, 90%, 95%, 97%, or 100% or no more than 20, 15, 10, 8, 5, 4, 3, 2, or 1 variations thereto. In some embodiments, the CD19 CAR comprises a polypeptide encoded by a nucleotide sequence of Table 34, or a nucleotide sequence having at least 80%, 85%, 90%, 95%, 97%, or 100% or no more than 20, 15, 10, 8, 5, 4, 3, 2, or 1 variations thereto. In some embodiments, the CD19 CAR comprises a polypeptide sequence of Table 34, or a polypeptide sequence having at least 80%, 85%, 90%, 95%, 97%, or 100% or no more than 20, 15, 10, 8, 5, 4, 3, 2, or 1 variations thereto. In some embodiments, the CD19 CAR comprises a heavy chain CDR1-3 and a light chain CDR1-3, of a sequence of Table 34. In some embodiments, the CD19 CAR comprises a heavy chain CDR1-3 and a light chain CDR1-3, of a sequence of Table 34 according to Kabat. In some embodiments, the CD19 CAR comprises a heavy chain CDR1-3 and a light chain CDR1-3, of a sequence of Table 34 according to Chothia. In some embodiments, the CD19 CAR comprises a heavy chain CDR1-3 of a sequence of Table 34. In some embodiments, the CD19 CAR comprises a heavy chain CDR1-3 of a sequence of Table 34 according to Kabat. In some embodiments, the CD19 CAR comprises a heavy chain CDR1-3 of a sequence of Table 34 according to Chothia. In some embodiments, the CD19 CAR comprises a light chain CDR1-3 of a sequence of Table 34. In some embodiments, the CD19 CAR comprises a light chain CDR1-3 of a sequence of Table 34 according to Kabat. In some embodiments, the CD19 CAR comprises a light chain CDR1-3 of a sequence of Table 34 according to Chothia.

TABLE 34
Amino acid and nucleic acid sequences of an exemplary CD19 CAR

| SEQ ID NO: | Description | Sequence |
|---|---|---|
| 387 | CAR19 F | MGTSLLCWMALCLLGADHADAQVQLQQSGPELVKPGASVKISCKAS |
| | polypeptide | GYAFSSSWMNWVKQRPGKGLEWIGRIYPGDEDTNYSGKFKDKATLT |
| | Sequence | ADKSSTTAYMQLSSLTSEDSAVYFCARSLLYGDYLDYWGQGTTLTV |
| | | SSGGGGSGGGGSGGGGSQIVLTQSPAIMSASPGEKVTMTCSASSSV |
| | | SYMHWYQQKSGTSPKRWIYDTSKLASGVPDRFSGSGSGTSYFLTIN |
| | | NMEAEDAATYYCQQWNINPLTFGAGTKLELKRSDPTTTPAPRPPTP |
| | | APTIASQPLSLRPEACRPAAGGAVHTRGLDFACDIYIWAPLAGTCG |
| | | VLLLSLVITLYCKRGRKKLLYIFKQPFMRPVQTTQEEDGCSCRFPE |
| | | EEEGGCELRVKFSRSADAPAYQQGQNQLYNELNLGRREEYDVLDKR |
| | | RGRDPEMGGKPRRKNPQEGLYNELQKDKMAEAYSEIGMKGERRRGK |
| | | GHDGLYQGLSTATKDTYDALHMQALPPR |
| 388 | CAR19 F | ATGGG CACCAGCCTG CTGTGCTGGA TGGCCCTGTG |
| | Nucleotide | CCTGCTGGGA GCCGACCACG CCGACGCCCA GGTGCAGCTG |
| | Sequence | CAGCAGAGCG GACCCGAGCT GGTGAAGCCC GGAGCCAGCG |
| | | TGAAGATCAG CTGCAAGGCC AGCGGCTACG CCTTCAGCAG |
| | | CAGCTGGATG AACTGGGTGA AGCAGCGGCC TGGCAAGGGC |
| | | CTGGAGTGGA TCGGCCGGAT CTACCCCGGC GACGAGGACA |
| | | CCAACTACAG CGGCAAGTTC AAGGACAAGG CCACCCTGAC |
| | | CGCCGACAAG AGCAGCACCA CCGCCTACAT GCAGCTGAGC |
| | | AGCCTGACCA GCGAGGACAG CGCCGTGTAC TTCTGCGCCC |
| | | GGAGCCTGCT GTACGGCGAC TACCTGGACT ACTGGGGCCA |
| | | GGGCACCACC CTGACCGTGA GCTCTGGCGG TGGCGGCTCT |
| | | GGCGGAGGTG GCTCTGGCGG AGGCGGCAGC CAGATCGTGC |
| | | TGACCCAGAG CCCTGCCATC ATGAGCGCCA GCCCTGGCGA |
| | | GAAGGTGACC ATGACCTGCA GCGCCAGCAG CAGCGTGAGC |
| | | TACATGCACT GGTACCAGCA GAAGAGCGGC ACCAGCCCTA |
| | | AGCGGTGGAT CTACGACACC AGCAAGCTGG CCAGCGGCGT |
| | | GCCCGACCGC TTCAGCGGCA GCGGCAGCGG CACCAGCTAC |
| | | TTCCTGACCA TCAACAACAT GGAGGCCGAG GACGCCGCCA |
| | | CCTACTACTG CCAGCAGTGG AACATCAATC CTCTGACCTT |
| | | CGGCGCCGGC ACCAAGCTGG AGCTGAAGCG GTCGGATCCC |
| | | ACCACCACCC CAGCCCCACG GCCACCTACC CCTGCCCCAA |
| | | CCATCGCCAG CCAGCCCCTG AGCCTGCGGC CTGAAGCCTG |
| | | CAGGCCTGCC GCCGGAGGAG CCGTGCACAC AAGGGGCCTG |
| | | GACTTCGCCT GCGACATCTA TATCTGGGCC CCCCTGGCCG |
| | | GGACATGCGG GGTGCTGCTG CTGTCCCTGG TGATTACACT |
| | | GTATTGCAAA CGGGGCCGGA AGAAGCTGCT GTACATCTTC |
| | | AAGCAGCCCT TCATGCGGCC CGTGCAGACC ACCCAGGAGG |
| | | AGGACGGCTG CAGCTGCCGG TTCCCCGAGG AAGAGGAAGG |
| | | CGGCTGCGAG CTGCGGGTGA AGTTCAGCCG GAGCGCCGAC |
| | | GCCCCAGCCT ACCAGCAGGG CCAGAACCAG CTGTACAACG |
| | | AGCTGAACCT GGGACGGCGG GAGGAGTACG ACGTGCTGGA |
| | | CAAGCGGCGG GGACGGGACC CCGAGATGGG CGGCAAGCCT |
| | | CGCCGGAAGA ATCCCCAGGA GGGCCTGTAC AACGAGCTGC |
| | | AGAAGGACAA GATGGCCGAG GCCTACAGCG AGATCGGCAT |
| | | GAAGGGCGAG CGGCGCCGGG GCAAGGGCCA CGACGGCCTG |
| | | TACCAGGGCC TGAGCACCGC CACCAAGGAC ACCTACGACG |
| | | CCCTGCACAT GCAGGCCCTG CCACCCCGGT GA |

### Exemplary CD19-CD20 CAR G

[0319] In some embodiments, the CD19 CAR is a bispecific CAR. In certain embodiments, the CD19 bispecific CAR comprises a light chain variable domain targeting CD19 and a heavy chain variable domain targeting a different target (e.g., CD20). In some embodiments, the bispecific car is an anti-CD19 and anti-CD20 CAR. In some embodiments, the bispecific CAR is encoded by a nucleotide sequence of Table 35, or a nucleotide sequence having at least 80%, 85%, 90%, 95%, 97%, or 100% or no more than 20, 15, 10, 8, 5, 4, 3, 2, or 1 variations thereto. In some embodiments, the bispecific CAR comprises a polypeptide encoded by a nucleotide sequence of Table 35, or a nucleotide sequence having at least 80%, 85%, 90%, 95%, 97%, or 100% or no more than 20, 15, 10, 8, 5, 4, 3, 2, or 1 variations thereto. In some embodiments, the bispecific CAR comprises a polypeptide sequence of Table 35, or a polypeptide sequence having at least 80%, 85%, 90%, 95%, 97%, or 100% or no more than 20, 15, 10, 8, 5, 4, 3, 2, or 1 variations thereto. In some embodiments, the bispecific CAR comprises a heavy chain CDR1-3 and a light chain CDR1-3, of a sequence of Table 35. In some embodiments, the bispecific CAR comprises a heavy chain CDR1-3 and a light chain CDR1-3, of a sequence of Table 35 according to Kabat. In some embodiments, the bispecific CAR comprises a heavy chain CDR1-3 and a light chain CDR1-3, of a sequence of Table 35 according to Chothia. In some embodiments, the bispecific CAR comprises a heavy chain CDR1-3 of a sequence of Table 35. In some embodiments, the bispecific CAR comprises a heavy chain CDR1-3 of a sequence of Table 35 according to Kabat. In some embodiments, the bispecific CAR comprises a heavy chain CDR1-3 of a sequence of Table 35 according to Chothia. In some embodiments, the bispecific CAR comprises a light chain CDR1-3 of a sequence of Table 35. In some embodiments, the bispecific CAR comprises a light chain CDR1-3 of a sequence of Table 35 according to Kabat. In some embodiments, the bispecific CAR comprises a light chain CDR1-3 of a sequence of Table 35 according to Chothia.

TABLE 35
Amino acid and nucleic acid sequences of an exemplary CD19 CAR

| SEQ ID NO: | Description | Sequence |
|---|---|---|
| 389 | Anti- | LLLVTSLLLCELPHPAFLLIPEVQLQQSGAELVKPGASVKMSCKASGY |
| | CD19/CD20 | TFTSYNMHWVKQTPGQGLEWIGAIYPGNGDTSYNQKFKGKATLTADKS |
| | CAR | SSTAYMQLSSLTSEDSADYYCARSNYYGSSYWFFDVWGAGTTVTVSSG |
| | polypeptide | GGGSGGGGSGGGGSDIVLTQSPAILSASPGEKVTMTCRASSSVNYMDW |
| | sequence | YQKKPGSSPKPWIYATSNLASGVPARFSGSGSGTSYSLTISRVEAEDA |
| | with leader | ATYYCQQWSFNPPTFGGGTKLEIKGGGGSGGGGSGGGGSGGGGSGGGG |
| | sequence | SDIQMTQTTSSLSASLGDRVTISCRASQDISKYLNWYQQKPDGTVKLL |
| | | IYHTSRLHSGVPSRFSGSGSGTDYSLTISNLEQEDIATYFCQQGNTLP |
| | | YTFGGGTKLEITGSTSGSGKPGSGEGSTKGEVKLQESGPGLVAPSQSL |
| | | SVTCTVSGVSLPDYGVSWIRQPPRKGLEWLGVIWGSETTYYNSALKSR |
| | | LTIIKDNSKSQVFLKMNSLQTDDTAIYYCAKHYYYGGSYAMDYWGQGT |
| | | SVTVSSAAATTTPAPRPPTPAPTIASQPLSLRPEACRPAAGGAVHTRG |
| | | LDFACDIYIWAPLAGTCGVLLLSLVITLYCKRGRKKLLYIFKQPFMRP |
| | | VQTTQEEDGCSCRFPEEEEGGCELRVKFSRSADAPAYQQGQNQLYNEL |
| | | NLGRREEYDVLDKRRGRDPEMGGKPRRKNPQEGLYNELQKDKMAEAYS |
| | | EIGMKGERRRGKGHDGLYQGLSTATKDTYDALHMQALPPR |
| 390 | Anti- | MSCKASGYTFTSYNMHWVKQTPGQGLEWIGAIYPGNGDTSYNQKFKGK |
| | CD19/CD20 | ATLTADKSSSTAYMQLSSLTSEDSADYYCARSNYYGSSYWFFDVWGAG |
| | CAR | TTVTVSSGGGGSGGGGSGGGGSDIVLTQSPAILSASPGEKVTMTCRAS |
| | polypeptide | SSVNYMDWYQKKPGSSPKPWIYATSNLASGVPARFSGSGSGTSYSLTI |
| | sequence | SRVEAEDAATYYCQQWSFNPPTFGGGTKLEIKGGGGSGGGGSGGGGSG |
| | | GGGSGGGGSDIQMTQTTSSLSASLGDRVTISCRASQDISKYLNWYQQK |
| | | PDGTVKLLIYHTSRLHSGVPSRFSGSGSGTDYSLTISNLEQEDIATYF |
| | | CQQGNTLPYTFGGGTKLEITGSTSGSGKPGSGEGSTKGEVKLQESGPG |
| | | LVAPSQSLSVTCTVSGVSLPDYGVSWIRQPPRKGLEWLGVIWGSETTY |
| | | YNSALKSRLTIIKDNSKSQVFLKMNSLQTDDTAIYYCAKHYYYGGSYA |
| | | MDYWGQGTSVTVSSAAATTTPAPRPPTPAPTIASQPLSLRPEACRPAA |
| | | GGAVHTRGLDFACDIYIWAPLAGTCGVLLLSLVITLYCKRGRKKLLYI |
| | | FKQPFMRPVQTTQEEDGCSCRFPEEEEGGCELRVKFSRSADAPAYQQG |
| | | QNQLYNELNLGRREEYDVLDKRRGRDPEMGGKPRRKNPQEGLYNELQK |
| | | DKMAEAYSEIGMKGERRRGKGHDGLYQGLSTATKDTYDALHMQALPPR |
| 391 | Anti- | GAGGTGCAGTTGCAACAGTCAGGAGCTGAACTGGTCAAGCCAGGAGCC |
| | CD19/CD20 | AGCGTGAAGATGAGCTGCAAGGCCTCCGGTTACACCTTCACCTCCTAC |
| | CAR | AACATGCACTGGGTGAAACAGACCCCGGGACAAGGGCTCGAATGGATT |
| | nucleotide | GGCGCCATCTACCCCGGGAATGGCGATACTTCGTACAACCAGAAGTTC |
| | sequence | AAGGGAAAGGCCACCCTGACCGCCGACAAGAGCTCCTCCACCGCGTAT |
| | | ATGCAGTTGAGCTCCCTGACCTCCGAGGACTCCGCCGACTACTACTGC |
| | | GCACGGTCCAACTACTATGGAAGCTCGTACTGGTTCTTCGATGTCTGG |
| | | GGGGCCGGCACCACTGTGACCGTCAGCTCCGGGGGCGGAGGATCCGGT |
| | | GGAGGCGGAAGCGGGGGTGGAGGATCCGACATTGTGCTGACTCAGTCC |
| | | CCGGCAATCCTGTCGGCCTCACCGGGCGAAAAGGTCACGATGACTTGT |
| | | AGAGCGTCGTCCAGCGTGAACTACATGGATTGGTACCAAAAGAAGCCT |
| | | GGATCGTCACCCAAGCCTTGGATCTACGCTACATCTAACCTGGCCTCC |
| | | GGCGTGCCAGCGCGGTTCAGCGGGTCCGGCTCGGGCACCTCATACTCG |
| | | CTGACCATCTCCCGCGTGGAGGCTGAGGACGCCGCGACCTACTACTGC |
| | | CAGCAGTGGTCCTTCAACCCGCCGACTTTTGGAGGCGGTACTAAGCTG |
| | | GAGATCAAAGGAGGCGGCGGCAGCGGCGGGGGAGGGTCCGGAGGGGGT |
| | | GGTTCTGGTGGAGGAGGATCGGGAGGCGGTGGCAGCGACATTCAGATG |
| | | ACTCAGACCACCTCCTCCCTGTCCGCCTCCCTGGGCGACCGCGTGACC |
| | | ATCTCATGCCGCGCCAGCCAGGACATCTCGAAGTACCTCAACTGGTAC |
| | | CAGCAGAAGCCCGACGGAACCGTGAAGCTCCTGATCTACCACACCTCC |
| | | CGGCTGCACAGCGGAGTGCCGTCTAGATTCTCGGGTTCGGGGTCGGGA |
| | | ACTGACTACTCCCTTACTATTTCCAACCTGGAGCAGGAGGATATTGCC |
| | | ACCTACTTCTGCCAACAAGGAAACACCCTGCCGTACACTTTTGGCGGG |
| | | GGAACCAAGCTGGAAATCACTGGCAGCACATCCGGTTCCGGGAAGCCC |
| | | GGCTCCGGAGAGGGCAGCACCAAGGGGGAAGTCAAGCTGCAGGAATCA |
| | | GGACCTGGCCTGGTGGCCCCGAGCCAGTCACTGTCCGTGACTTGTACT |
| | | GTGTCCGGAGTGTCGCTCCCGGATTACGGAGTGTCCTGGATCAGGCAG |
| | | CCACCTCGGAAAGGATTGGAATGGCTCGGAGTCATCTGGGGTTCCGAA |
| | | ACCACCTATTACAACTCGGCACTGAAATCCAGGCTCACCATTATCAAG |
| | | GATAACTCCAAGTCACAAGTGTTCCTGAAGATGAATAGCCTGCAGACT |
| | | GACGACACGGCGATCTACTATTGCGCCAAGCACTACTACTACGGCGGA |
| | | TCCTACGCTATGGACTACTGGGGCCAGGGGACCAGCGTGACCGTGTCA |
| | | TCCGCGGCCGCAACTACCACCCCTGCCCCTCGGCCGCCGACTCCGGCC |
| | | CCAACCATCGCAAGCCAACCCCTCTCCTTGCGCCCCGAAGCTTGCCGC |
| | | CCGGCCGCGGGTGGAGCCGTGCATACCCGGGGGCTGGACTTTGCCTGC |
| | | GATATCTACATTTGGGCCCCGCTGGCCGGCACTTGCGGCGTGCTCCTG |
| | | CTGTCGCTGGTCATCACCCTTTACTGCAAGAGGGGCCGGAAGAAGCTG |
| | | CTTTACATCTTCAAGCAGCCGTTCATGCGGCCCGTGCAGACGACTCAG |
| | | GAAGAGGACGGATGCTCGTGCAGATTCCCTGAGGAGGAAGAGGGGGGA |
| | | TGCGAACTGCGCGTCAAGTTCTCACGGTCCGCCGACGCCCCCGCATAT |
| | | CAACAGGGCCAGAATCAGCTCTACAACGAGCTGAACCTGGGAAGGAGA |
| | | GAGGAGTACGACGTGCTGGACAAGCGACGCGGACGCGACCCGGAGATG |
| | | GGGGGGAAACCACGGCGGAAAAACCCTCAGGAAGGACTGTACAACGAA |
| | | CTCCAGAAAGACAAGATGGCGGAAGCCTACTCAGAAATCGGGATGAAG |
| | | GGAGAGCGGAGGAGGGGAAAGGGTCACGACGGGCTGTACCAGGGACTG |
| | | AGCACCGCCACTAAGGATACCTACGATGCCTTGCATATGCAAGCACTC |
| | | CCACCCCGG |

### BCMA

[0320] A non-limiting exemplary tumor antigen is BCMA. CARs that bind to BCMA are known in the art. For example, those disclosed WO2016/014565 or WO2019/241426 can be used in accordance with the present disclosure. Any known BCMA CAR, for example, the BCMA antigen binding domain of any known BCMA CAR, in the art can be used in accordance with the present disclosure. For example, BCMA-1, BCMA-2, BCMA-3, BCMA-4, BCMA-5, BCMA-6, BCMA-7, BCMA-8, BCMA-9, BCMA-10, BCMA-11, BCMA-12, BCMA-13, BCMA-14, BCMA-15, 149362, 149363, 149364, 149365, 149366, 149367, 149368, 149369, BCMA_EBB-C1978-A4, BCMA_EBB-C1978-G1, BCMA_EBB-C1979-C1, BCMA_EBB-C1978-C7, BCMA_EBB-C1978-D10, BCMA_EBB-C1979-C12, BCMA_EBB-C1980-G4, BCMA_EBB-C1980-D2, BCMA_EBB-C1978-A10, BCMA_EBB-C1978-D4, BCMA_EBB-C1980-A2, BCMA_EBB-C1981-C3, BCMA_EBB-C1978-G4, A7D12.2, C11D5.3, C12A3.2, or C13F12.1, disclosed in WO2016/014565.

[0321] In some embodiments, the BCMA CAR comprises one or more CDRs, VH, VL, scFv, or full-length sequences of BCMA-1, BCMA-2, BCMA-3, BCMA-4, BCMA-5, BCMA-6, BCMA-7, BCMA-8, BCMA-9, BCMA-10, BCMA-11, BCMA-12, BCMA-13, BCMA-14, BCMA-15, 149362, 149363, 149364, 149365, 149366, 149367, 149368, 149369, BCMA_EBB-C1978-A4, BCMA_EBB-C1978-G1, BCMA_EBB-C1979-C1, BCMA_EBB-C1978-C7, BCMA_EBB-C1978-D10, BCMA_EBB-C1979-C12, BCMA_EBB-C1980-G4, BCMA_EBB-C1980-D2, BCMA_EBB-C1978-A10, BCMA_EBB-C1978-D4, BCMA_EBB-C1980-A2, BCMA_EBB-C1981-C3, BCMA_EBB-C1978-G4, A7D12.2, C11D5.3, C12A3.2, or C13F12.1 disclosed in WO2016/014565, or a sequence substantially (for example, 95-99%) identical thereto.

[0322] Exemplary antigen binding domains that bind BCMA are disclosed in WO2012/0163805, WO 2017/021450, WO 2017/011804, WO 2017/025038, WO 2016/090327, WO 2016/130598, WO 2016/210293, WO 2016/090320, WO 2016/014789, WO 2016/094304, WO 2016/154055, WO 2015/166073, WO 2015/188119, WO 2015/158671, U.S. Pat. Nos. 9,243,058, 8,920,776, 9,273,141, 7,083,785, 9,034,324, US 2007/0049735, US 2015/0284467, US 2015/0051266, US 2015/0344844, US 2016/0131655, US 2016/0297884, US 2016/0297885, US 2017/0051308, US 2017/0051252, WO 2016/020332, WO 2016/087531, WO 2016/079177, WO 2015/172800, WO 2017/008169, U.S. Pat. No. 9,340,621, US 2013/0273055, US 2016/0176973, US 2015/0368351, US 2017/0051068, US 2016/0368988, and US 2015/0232557, herein incorporated by reference in their entirety. In some embodiments, the antigen binding domain of one or more of the BCMA antigen binding domains disclosed therein.

[0323] In some embodiments, the antigen binding domain comprises a human antibody or a human antibody fragment that binds BCMA. In some embodiments, the antigen binding domain comprises one or more (for example, all three) LC CDR1, LC CDR2, and LC CDR3 of a human anti-BCMA binding domain described herein (for example, in Tables 2-14), and/or one or more (for example, all three) HC CDR1, HC CDR2, and HC CDR3 of a human anti-BCMA binding domain described herein (for example, in Tables 2-14). In some embodiments, the human anti-BCMA binding domain comprises a human VL described herein (for example, in Tables 2, 6, and 10) and/or a human VH described herein (for example, in Tables 2, 6, and 10). In some embodiments, the antigen binding domain is a scFv comprising a VL and a VH of an amino acid sequence of Tables 2, 6, and 10. In some embodiments, the antigen binding domain (for example, an scFv) comprises: a VL comprising an amino acid sequence having at least one, two or three modifications (for example, substitutions, for example, conservative substitutions) but not more than 30, 20 or 10 modifications (for example, substitutions, for example, conservative substitutions) of an amino acid sequence provided in Tables 2, 6, and 10, or a sequence with 95-99% identity with an amino acid sequence of Tables 2, 6, and 10; and/or a VH comprising an amino acid sequence having at least one, two or three modifications (for example, substitutions, for example, conservative substitutions) but not more than 30, 20 or 10 modifications (for example, substitutions, for example, conservative substitutions) of an amino acid sequence provided in Tables 2, 6, and 10, or a sequence with 95-99% identity to an amino acid sequence of Tables 2, 6, and 10.

[0324] In certain embodiments, the antigen binding domain described herein includes: (1) one, two, or three light chain (LC) CDRs chosen from:
[0325] (i) a LC CDR1 of SEQ ID NO: 54, LC CDR2 of SEQ ID NO: 55 and LC CDR3 of SEQ ID NO: 56; and/or
[0326] (2) one, two, or three heavy chain (HC) CDRs from one of the following: (i) a HC CDR1 of SEQ ID NO: 44, HC CDR2 of SEQ ID NO: 45 and HC CDR3 of SEQ ID NO: 84; (ii) a HC CDR1 of SEQ ID NO: 44, HC CDR2 of SEQ ID NO: 45 and HC CDR3 of SEQ ID NO: 46; (iii) a HC CDR1 of SEQ ID NO: 44, HC CDR2 of SEQ ID NO: 45 and HC CDR3 of SEQ ID NO: 68; or (iv) a HC CDR1 of SEQ ID NO: 44, HC CDR2 of SEQ ID NO: 45 and HC CDR3 of SEQ ID NO: 76.

[0327] In certain embodiments, the antigen binding domain described herein includes:
[0328] (1) one, two, or three light chain (LC) CDRs from one of the following:
[0329] (i) a LC CDR1 of SEQ ID NO: 95, LC CDR2 of SEQ ID NO: 131 and LC CDR3 of SEQ ID NO: 132; (ii) a LC CDR1 of SEQ ID NO: 95, LC CDR2 of SEQ ID NO: 96 and LC CDR3 of SEQ ID NO: 97; (iii) a LC CDR1 of SEQ ID NO: 95, LC CDR2 of SEQ ID NO: 114 and LC CDR3 of SEQ ID NO: 115; or (iv) a LC CDR1 of SEQ ID NO: 95, LC CDR2 of SEQ ID NO: 114 and LC CDR3 of SEQ ID NO: 97; and/or
[0330] (2) one, two, or three heavy chain (HC) CDRs from one of the following:
[0331] (i) a HC CDR1 of SEQ ID NO: 86, HC CDR2 of SEQ ID NO: 130 and HC CDR3 of SEQ ID NO: 88; (ii) a HC CDR1 of SEQ ID NO: 86, HC CDR2 of SEQ ID NO: 87 and HC CDR3 of SEQ ID NO: 88; or (iii) a HC CDR1 of SEQ ID NO: 86, HC CDR2 of SEQ ID NO: 109 and HC CDR3 of SEQ ID NO: 88.

[0332] In certain embodiments, the antigen binding domain described herein includes:
[0333] (1) one, two, or three light chain (LC) CDRs from one of the following:
[0334] (i) a LC CDR1 of SEQ ID NO: 147, LC CDR2 of SEQ ID NO: 182 and LC CDR3 of SEQ ID NO: 183; (ii) a LC CDR1 of SEQ ID NO: 147, LC CDR2 of SEQ ID NO: 148 and LC CDR3 of SEQ ID NO: 149; or (iii) a LC CDR1 of SEQ ID NO: 147, LC CDR2 of SEQ ID NO: 170 and LC CDR3 of SEQ ID NO: 171; and/or
[0335] (2) one, two, or three heavy chain (HC) CDRs from one of the following:
[0336] (i) a HC CDR1 of SEQ ID NO: 179, HC CDR2 of SEQ ID NO: 180 and HC CDR3 of SEQ ID NO: 181; (ii) a HC CDR1 of SEQ ID NO: 137, HC CDR2 of SEQ ID NO: 138 and HC CDR3 of SEQ ID NO: 139; or (iii) a HC CDR1 of SEQ ID NO: 160, HC CDR2 of SEQ ID NO: 161 and HC CDR3 of SEQ ID NO: 162.

[0337] In some embodiments, the HC CDR1, HC CDR2, HC CDR3, LC CDR1, LC CDR2, and LC CDR3 comprise the amino acid sequences of SEQ ID NOs: 44, 45, 84, 54, 55, and 56, respectively. In some embodiments, the HC CDR1, HC CDR2, HC CDR3, LC CDR1, LC CDR2, and LC CDR3 comprise the amino acid sequences of SEQ ID NOs: 44, 45, 46, 54, 55, and 56, respectively. In some embodiments, the HC CDR1, HC CDR2, HC CDR3, LC CDR1, LC CDR2, and LC CDR3 comprise the amino acid sequences of SEQ ID NOs: 44, 45, 68, 54, 55, and 56, respectively. In some embodiments, the HC CDR1, HC CDR2, HC CDR3, LC CDR1, LC CDR2, and LC CDR3 comprise the amino acid sequences of SEQ ID NOs: 44, 45, 76, 54, 55, and 56, respectively.

[0338] In some embodiments, the HC CDR1, HC CDR2, HC CDR3, LC CDR1, LC CDR2, and LC CDR3 comprise the amino acid sequences of SEQ ID NOs: 47, 48, 84, 57, 58, and 59, respectively. In some embodiments, the HC CDR1, HC CDR2, HC CDR3, LC CDR1, LC CDR2, and LC CDR3 comprise the amino acid sequences of SEQ ID NOs: 47, 48, 46, 57, 58, and 59, respectively. In some embodiments, the HC CDR1, HC CDR2, HC CDR3, LC CDR1, LC CDR2, and LC CDR3 comprise the amino acid sequences of SEQ ID NOs: 47, 48, 68, 57, 58, and 59, respectively. In some embodiments, the HC CDR1, HC CDR2, HC CDR3, LC CDR1, LC CDR2, and LC CDR3 comprise the amino acid sequences of SEQ ID NOs: 47, 48, 76, 57, 58, and 59, respectively.

[0339] In some embodiments, the HC CDR1, HC CDR2, HC CDR3, LC CDR1, LC CDR2, and LC CDR3 comprise the amino acid sequences of SEQ ID NOs: 49, 50, 85, 60, 58, and 56, respectively. In some embodiments, the HC CDR1, HC CDR2, HC CDR3, LC CDR1, LC CDR2, and LC CDR3 comprise the amino acid sequences of SEQ ID NOs: 49, 50, 51, 60, 58, and 56, respectively. In some embodiments, the HC CDR1, HC CDR2, HC CDR3, LC CDR1, LC CDR2, and LC CDR3 comprise the amino acid sequences of SEQ ID NOs: 49, 50, 69, 60, 58, and 56, respectively. In some embodiments, the HC CDR1, HC CDR2, HC CDR3, LC CDR1, LC CDR2, and LC CDR3 comprise the amino acid sequences of SEQ ID NOs: 49, 50, 77, 60, 58, and 56, respectively.

[0340] In some embodiments, a BCMA CAR comprises a sequence, for example, a CDR, VH, VL, scFv, or full-CAR sequence, disclosed in Tables 2-14, or a sequence having at least 80%, 85%, 90%, 95%, or 99% identity thereto.

TABLE 2
Amino acid and nucleic acid sequences of exemplary
PALLAS-derived anti-BCMA molecules

| SEQ ID NO | Name/Description | Sequence |
|---|---|---|
| R1B6 | | |
| SEQ ID | HCDR1 | SYAMS |
| NO: 44 | (Kabat) | |
| SEQ ID | HCDR2 | AISGSGGSTYYADSVKG |
| NO: 45 | (Kabat) | |
| SEQ ID | HCDR3 | REWVPYDVSWYFDY |
| NO: 46 | (Kabat) | |
| SEQ ID | HCDR1 | GFTFSSY |
| NO: 47 | (Chothia) | |
| SEQ ID | HCDR2 | SGSGGS |
| NO: 48 | (Chothia) | |
| SEQ ID | HCDR3 | REWVPYDVSWYFDY |
| NO: 46 | (Chothia) | |
| SEQ ID | HCDR1 | GFTFSSYA |
| NO: 49 | (IMGT) | |
| SEQ ID | HCDR2 | ISGSGGST |
| NO: 50 | (IMGT) | |
| SEQ ID | HCDR3 | ARREWVPYDVSWYFDY |
| NO: 51 | (IMGT) | |
| SEQ ID | VH | EVQLLESGGGLVQPGGSLRLSCAASGFTFSSYAMSWVRQAPG |
| NO: 52 | | KGLEWVSAISGSGGSTYYADSVKGRFTISRDNSKNTLYLQMNS |
| | | LRAEDTAVYYCARREWVPYDVSWYFDYWGQGTLVTVSS |
| SEQ ID | DNA VH | GAAGTGCAGTTGCTGGAGTCAGGCGGAGGACTGGTGCAGCC |
| NO: 53 | | CGGAGGATCGCTTCGCTTGAGCTGCGCAGCCTCAGGCTTTA |
| | | CCTTCTCCTCCTACGCCATGTCCTGGGTCAGACAGGCTCCCG |
| | | GGAAGGGACTGGAATGGGTGTCCGCCATTAGCGGTTCCGGC |
| | | GGAAGCACTTACTATGCCGACTCTGTGAAGGGCCGCTTCAC |
| | | TATCTCCCGGGACAACTCCAAGAACACCCTGTATCTCCAAA |
| | | TGAATTCCCTGAGGGCCGAAGATACCGCGGTGTACTACTGC |
| | | GCTAGACGGGAGTGGGTGCCCTACGATGTCAGCTGGTACTT |
| | | CGACTACTGGGGACAGGGCACTCTCGTGACTGTGTCCTCC |
| SEQ ID | LCDR1 | RASQSISSYLN |
| NO: 54 | (Kabat) | |
| SEQ ID | LCDR2 | AASSLQS |
| NO: 55 | (Kabat) | |
| SEQ ID | LCDR3 | QQSYSTPLT |
| NO: 56 | (Kabat) | |
| SEQ ID | LCDR1 | SQSISSY |
| NO: 57 | (Chothia) | |
| SEQ ID | LCDR2 | AAS |
| NO: 58 | (Chothia) | |
| SEQ ID | LCDR3 | SYSTPL |
| NO: 59 | (Chothia) | |
| SEQ ID | LCDR1 | QSISSY |
| NO: 60 | (IMGT) | |
| SEQ ID | LCDR2 | AAS |
| NO: 58 | (IMGT) | |
| SEQ ID | LCDR3 | QQSYSTPLT |
| NO: 56 | (IMGT) | |
| SEQ ID | VL | DIQMTQSPSSLSASVGDRVTITCRASQSISSYLNWYQQKPGKAP |
| NO: 61 | | KLLIYAASSLQSGVPSRFSGSGSGTDFTLTISSLQPEDFATYYCQ |
| | | QSYSTPLTFGQGTKVEIK |
| SEQ ID | DNA VL | GACATTCAAATGACTCAGTCCCCGTCCTCCCTCTCCGCCTCC |
| NO: 62 | | GTGGGAGATCGCGTCACGATCACGTGCAGGGCCAGCCAGAG |
| | | CATCTCCAGCTACCTGAACTGGTACCAGCAGAAGCCAGGGA |
| | | AGGCACCGAAGCTCCTGATCTACGCCGCTAGCTCGCTGCAG |
| | | TCCGGCGTCCCTTCACGGTTCTCGGGATCGGGCTCAGGCACC |
| | | GACTTCACCCTGACCATTAGCAGCCTGCAGCCGGAGGACTT |
| | | CGCGACATACTACTGTCAGCAGTCATACTCCACCCCTCTGAC |
| | | CTTCGGCCAAGGGACCAAAGTGGAGATCAAG |
| SEQ ID | Linker | GGGGSGGGGSGGGGSGGGGS |
| NO: 63 | | |
| SEQ ID | scFv (VH- | EVQLLESGGGLVQPGGSLRLSCAASGFTFSSYAMSWVRQAPG |
| NO: 64 | linker-VL) | KGLEWVSAISGSGGSTYYADSVKGRFTISRDNSKNTLYLQMNS |
| | | LRAEDTAVYYCARREWVPYDVSWYFDYWGQGTLVTVSSGGG |
| | | GSGGGGSGGGGSGGGGSDIQMTQSPSSLSASVGDRVTITCRAS |
| | | QSISSYLNWYQQKPGKAPKLLIYAASSLQSGVPSRFSGSGSGTD |
| | | FTLTISSLQPEDFATYYCQQSYSTPLTFGQGTKVEIK |
| SEQ ID | DNA scFv | GAAGTGCAGTTGCTGGAGTCAGGCGGAGGACTGGTGCAGCC |
| NO: 65 | | CGGAGGATCGCTTCGCTTGAGCTGCGCAGCCTCAGGCTTTA |
| | | CCTTCTCCTCCTACGCCATGTCCTGGGTCAGACAGGCTCCCG |
| | | GGAAGGGACTGGAATGGGTGTCCGCCATTAGCGGTTCCGGC |
| | | GGAAGCACTTACTATGCCGACTCTGTGAAGGGCCGCTTCAC |
| | | TATCTCCCGGGACAACTCCAAGAACACCCTGTATCTCCAAA |
| | | TGAATTCCCTGAGGGCCGAAGATACCGCGGTGTACTACTGC |
| | | GCTAGACGGGAGTGGGTGCCCTACGATGTCAGCTGGTACTT |
| | | CGACTACTGGGGACAGGGCACTCTCGTGACTGTGTCCTCCG |
| | | GTGGTGGTGGATCGGGGGGTGGTGGTTCGGGCGGAGGAGG |
| | | ATCTGGAGGAGGAGGGTCGGACATTCAAATGACTCAGTCCC |
| | | CGTCCTCCCTCTCCGCCTCCGTGGGAGATCGCGTCACGATCA |
| | | CGTGCAGGGCCAGCCAGAGCATCTCCAGCTACCTGAACTGG |
| | | TACCAGCAGAAGCCAGGGAAGGCACCGAAGCTCCTGATCTA |
| | | CGCCGCTAGCTCGCTGCAGTCCGGCGTCCCTTCACGGTTCTC |
| | | GGGATCGGGCTCAGGCACCGACTTCACCCTGACCATTAGCA |
| | | GCCTGCAGCCGGAGGACTTCGCGACATACTACTGTCAGCAG |
| | | TCATACTCCACCCCTCTGACCTTCGGCCAAGGGACCAAAGT |
| | | GGAGATCAAG |
| SEQ ID | Full CAR | EVQLLESGGGLVQPGGSLRLSCAASGFTFSSYAMSWVRQAPG |
| NO: 66 | amino acid | KGLEWVSAISGSGGSTYYADSVKGRFTISRDNSKNTLYLQMNS |
| | sequence | LRAEDTAVYYCARREWVPYDVSWYFDYWGQGTLVTVSSGGG |
| | | GSGGGGSGGGGSGGGGSDIQMTQSPSSLSASVGDRVTITCRAS |
| | | QSISSYLNWYQQKPGKAPKLLIYAASSLQSGVPSRFSGSGSGTD |
| | | FTLTISSLQPEDFATYYCQQSYSTPLTFGQGTKVEIKTTTPAPRP |
| | | PTPAPTIASQPLSLRPEACRPAAGGAVHTRGLDFACDIYIWAPL |
| | | AGTCGVLLLSLVITLYCKRGRKKLLYIFKQPFMRPVQTTQEED |
| | | GCSCRFPEEEEGGCELRVKFSRSADAPAYQQGQNQLYNELNLG |
| | | RREEYDVLDKRRGRDPEMGGKPRRKNPQEGLYNELQKDKMA |
| | | EAYSEIGMKGERRRGKGHDGLYQGLSTATKDTYDALHMQAL |
| | | PPR |
| SEQ ID | Full CAR | GAAGTGCAGTTGCTGGAGTCAGGCGGAGGACTGGTGCAGCC |
| NO: 67 | DNA | CGGAGGATCGCTTCGCTTGAGCTGCGCAGCCTCAGGCTTTA |
| | sequence | CCTTCTCCTCCTACGCCATGTCCTGGGTCAGACAGGCTCCCG |
| | | GGAAGGGACTGGAATGGGTGTCCGCCATTAGCGGTTCCGGC |
| | | GGAAGCACTTACTATGCCGACTCTGTGAAGGGCCGCTTCAC |
| | | TATCTCCCGGGACAACTCCAAGAACACCCTGTATCTCCAAA |
| | | TGAATTCCCTGAGGGCCGAAGATACCGCGGTGTACTACTGC |
| | | GCTAGACGGGAGTGGGTGCCCTACGATGTCAGCTGGTACTT |
| | | CGACTACTGGGGACAGGGCACTCTCGTGACTGTGTCCTCCG |
| | | GTGGTGGTGGATCGGGGGGTGGTGGTTCGGGCGGAGGAGG |
| | | ATCTGGAGGAGGAGGGTCGGACATTCAAATGACTCAGTCCC |
| | | CGTCCTCCCTCTCCGCCTCCGTGGGAGATCGCGTCACGATCA |
| | | CGTGCAGGGCCAGCCAGAGCATCTCCAGCTACCTGAACTGG |
| | | TACCAGCAGAAGCCAGGGAAGGCACCGAAGCTCCTGATCTA |
| | | CGCCGCTAGCTCGCTGCAGTCCGGCGTCCCTTCACGGTTCTC |
| | | GGGATCGGGCTCAGGCACCGACTTCACCCTGACCATTAGCA |
| | | GCCTGCAGCCGGAGGACTTCGCGACATACTACTGTCAGCAG |
| | | TCATACTCCACCCCTCTGACCTTCGGCCAAGGGACCAAAGT |
| | | GGAGATCAAGACCACTACCCCAGCACCGAGGCCACCCACCC |
| | | CGGCTCCTACCATCGCCTCCCAGCCTCTGTCCCTGCGTCCGG |
| | | AGGCATGTAGACCCGCAGCTGGTGGGGCCGTGCATACCCGG |
| | | GGTCTTGACTTCGCCTGCGATATCTACATTTGGGCCCCTCTG |
| | | GCTGGTACTTGCGGGGTCCTGCTGCTTTCACTCGTGATCACT |
| | | CTTTACTGTAAGCGCGGTCGGAAGAAGCTGCTGTACATCTTT |
| | | AAGCAACCCTTCATGAGGCCTGTGCAGACTACTCAAGAGGA |
| | | GGACGGCTGTTCATGCCGGTTCCCAGAGGAGGAGGAAGGCG |
| | | GCTGCGAACTGCGCGTGAAATTCAGCCGCAGCGCAGATGCT |
| | | CCAGCCTACCAGCAGGGGCAGAACCAGCTCTACAACGAACT |
| | | CAATCTTGGTCGGAGAGAGGAGTACGACGTGCTGGACAAGC |
| | | GGAGAGGACGGGACCCAGAAATGGGCGGGAAGCCGCGCAG |
| | | AAAGAATCCCCAAGAGGGCCTGTACAACGAGCTCCAAAAG |
| | | GATAAGATGGCAGAAGCCTATAGCGAGATTGGTATGAAAG |
| | | GGGAACGCAGAAGAGGCAAAGGCCACGACGGACTGTACCA |
| | | GGGACTCAGCACCGCCACCAAGGACACCTATGACGCTCTTC |
| | | ACATGCAGGCCCTGCCGCCTCGG |
| R1F2 | | |
| SEQ ID | HCDR1 | SYAMS |
| NO: 44 | (Kabat) | |
| SEQ ID | HCDR2 | AISGSGGSTYYADSVKG |
| NO: 45 | (Kabat) | |
| SEQ ID | HCDR3 | REWWYDDWYLDY |
| NO: 68 | (Kabat) | |
| SEQ ID | HCDR1 | GFTFSSY |
| NO: 47 | (Chothia) | |
| SEQ ID | HCDR2 | SGSGGS |
| NO: 48 | (Chothia) | |
| SEQ ID | HCDR3 | REWWYDDWYLDY |
| NO: 68 | (Chothia) | |
| SEQ ID | HCDR1 | GFTFSSYA |
| NO: 49 | (IMGT) | |
| SEQ ID | HCDR2 | ISGSGGST |
| NO: 50 | (IMGT) | |
| SEQ ID | HCDR3 | ARREWWYDDWYLDY |
| NO: 69 | (IMGT) | |
| SEQ ID | VH | EVQLLESGGGLVQPGGSLRLSCAASGFTFSSYAMSWVRQAPG |
| NO: 70 | | KGLEWVSAISGSGGSTYYADSVKGRFTISRDNSKNTLYLQMNS |
| | | LRAEDTAVYYCARREWWYDDWYLDYWGQGTLVTVSS |
| SEQ ID | DNA VH | GAAGTGCAGTTGCTGGAGTCAGGCGGAGGACTGGTGCAGCC |
| NO: 71 | | CGGAGGATCGCTTCGCTTGAGCTGCGCAGCCTCAGGCTTTA |
| | | CCTTCTCCTCCTACGCCATGTCCTGGGTCAGACAGGCTCCCG |
| | | GGAAGGGACTGGAATGGGTGTCCGCCATTAGCGGTTCCGGC |
| | | GGAAGCACTTACTATGCCGACTCTGTGAAGGGCCGCTTCAC |
| | | TATCTCCCGGGACAACTCCAAGAACACCCTGTATCTCCAAA |
| | | TGAATTCCCTGAGGGCCGAAGATACCGCGGTGTACTACTGC |
| | | GCTAGACGGGAGTGGTGGTACGACGATTGGTACCTGGACTA |
| | | CTGGGGACAGGGCACTCTCGTGACTGTGTCCTCC |
| SEQ ID | LCDR1 | RASQSISSYLN |
| NO: 54 | (Kabat) | |
| SEQ ID | LCDR2 | AASSLQS |
| NO: 55 | (Kabat) | |
| SEQ ID | LCDR3 | QQSYSTPLT |
| NO: 56 | (Kabat) | |
| SEQ ID | LCDR1 | SQSISSY |
| NO: 57 | (Chothia) | |
| SEQ ID | LCDR2 | AAS |
| NO: 58 | (Chothia) | |
| SEQ ID | LCDR3 | SYSTPL |
| NO: 59 | (Chothia) | |
| SEQ ID | LCDR1 | QSISSY |
| NO: 60 | (IMGT) | |
| SEQ ID | LCDR2 | AAS |
| NO: 58 | (IMGT) | |
| SEQ ID | LCDR3 | QQSYSTPLT |
| NO: 56 | (IMGT) | |
| SEQ ID | VL | DIQMTQSPSSLSASVGDRVTITCRASQSISSYLNWYQQKPGKAP |
| NO: 61 | | KLLIYAASSLQSGVPSRFSGSGSGTDFTLTISSLQPEDFATYYCQ |
| | | QSYSTPLTFGQGTKVEIK |
| SEQ ID | DNA VL | GACATTCAAATGACTCAGTCCCCGTCCTCCCTCTCCGCCTCC |
| NO: 62 | | GTGGGAGATCGCGTCACGATCACGTGCAGGGCCAGCCAGAG |
| | | CATCTCCAGCTACCTGAACTGGTACCAGCAGAAGCCAGGGA |
| | | AGGCACCGAAGCTCCTGATCTACGCCGCTAGCTCGCTGCAG |
| | | TCCGGCGTCCCTTCACGGTTCTCGGGATCGGGCTCAGGCACC |
| | | GACTTCACCCTGACCATTAGCAGCCTGCAGCCGGAGGACTT |
| | | CGCGACATACTACTGTCAGCAGTCATACTCCACCCCTCTGAC |
| | | CTTCGGCCAAGGGACCAAAGTGGAGATCAAG |
| SEQ ID | Linker | GGGGSGGGGSGGGGSGGGGS |
| NO: 63 | | |
| SEQ ID | scFv (VH- | EVQLLESGGGLVQPGGSLRLSCAASGFTFSSYAMSWVRQAPG |
| NO: 72 | linker-VL) | KGLEWVSAISGSGGSTYYADSVKGRFTISRDNSKNTLYLQMNS |
| | | LRAEDTAVYYCARREWWYDDWYLDYWGQGTLVTVSSGGGG |
| | | SGGGGSGGGGSGGGGSDIQMTQSPSSLSASVGDRVTITCRASQ |
| | | SISSYLNWYQQKPGKAPKLLIYAASSLQSGVPSRFSGSGSGTDF |
| | | TLTISSLQPEDFATYYCQQSYSTPLTFGQGTKVEIK |
| SEQ ID | DNA scFv | GAAGTGCAGTTGCTGGAGTCAGGCGGAGGACTGGTGCAGCC |
| NO: 73 | | CGGAGGATCGCTTCGCTTGAGCTGCGCAGCCTCAGGCTTTA |
| | | CCTTCTCCTCCTACGCCATGTCCTGGGTCAGACAGGCTCCCG |
| | | GGAAGGGACTGGAATGGGTGTCCGCCATTAGCGGTTCCGGC |
| | | GGAAGCACTTACTATGCCGACTCTGTGAAGGGCCGCTTCAC |
| | | TATCTCCCGGGACAACTCCAAGAACACCCTGTATCTCCAAA |
| | | TGAATTCCCTGAGGGCCGAAGATACCGCGGTGTACTACTGC |
| | | GCTAGACGGGAGTGGTGGTACGACGATTGGTACCTGGACTA |
| | | CTGGGGACAGGGCACTCTCGTGACTGTGTCCTCCGGTGGTG |
| | | GTGGATCGGGGGGTGGTGGTTCGGGCGGAGGAGGATCTGG |
| | | AGGAGGAGGGTCGGACATTCAAATGACTCAGTCCCCGTCCT |
| | | CCCTCTCCGCCTCCGTGGGAGATCGCGTCACGATCACGTGC |
| | | AGGGCCAGCCAGAGCATCTCCAGCTACCTGAACTGGTACCA |
| | | GCAGAAGCCAGGGAAGGCACCGAAGCTCCTGATCTACGCCG |
| | | CTAGCTCGCTGCAGTCCGGCGTCCCTTCACGGTTCTCGGGAT |
| | | CGGGCTCAGGCACCGACTTCACCCTGACCATTAGCAGCCTG |
| | | CAGCCGGAGGACTTCGCGACATACTACTGTCAGCAGTCATA |
| | | CTCCACCCCTCTGACCTTCGGCCAAGGGACCAAAGTGGAGA |
| | | TCAAG |
| SEQ ID | Full CAR | EVQLLESGGGLVQPGGSLRLSCAASGFTFSSYAMSWVRQAPG |
| NO: 74 | amino acid | KGLEWVSAISGSGGSTYYADSVKGRFTISRDNSKNTLYLQMNS |
| | sequence | LRAEDTAVYYCARREWWYDDWYLDYWGQGTLVTVSSGGGG |
| | | SGGGGSGGGGSGGGGSDIQMTQSPSSLSASVGDRVTITCRASQ |
| | Full CAR | SISSYLNWYQQKPGKAPKLLIYAASSLQSGVPSRFSGSGSGTDF |
| | DNA | TLTISSLOPEDFATYYCQQSYSTPLTFGQGTKVEIKTTTPAPRPP |
| | | TPAPTIASQPLSLRPEACRPAAGGAVHTRGLDFACDIYIWAPLA |
| | | GTCGVLLLSLVITLYCKRGRKKLLYIFKQPFMRPVQTTQEEDG |
| | | CSCRFPEEEEGGCELRVKFSRSADAPAYQQGQNQLYNELNLGR |
| | | REEYDVLDKRRGRDPEMGGKPRRKNPQEGLYNELQKDKMAE |
| | | AYSEIGMKGERRRGKGHDGLYQGLSTATKDTYDALHMQALPP |
| | | R |
| | | GAAGTGCAGTTGCTGGAGTCAGGCGGAGGACTGGTGCAGCC |
| | | CGGAGGATCGCTTCGCTTGAGCTGCGCAGCCTCAGGCTTTA |
| | | CCTTCTCCTCCTACGCCATGTCCTGGGTCAGACAGGCTCCCG |
| | | GGAAGGGACTGGAATGGGTGTCCGCCATTAGCGGTTCCGGC |
| | | GGAAGCACTTACTATGCCGACTCTGTGAAGGGCCGCTTCAC |
| | | TATCTCCCGGGACAACTCCAAGAACACCCTGTATCTCCAAA |
| | | TGAATTCCCTGAGGGCCGAAGATACCGCGGTGTACTACTGC |
| | | GCTAGACGGGAGTGGTGGTACGACGATTGGTACCTGGACTA |
| | | CTGGGGACAGGGCACTCTCGTGACTGTGTCCTCCGGTGGTG |
| | | GTGGATCGGGGGGTGGTGGTTCGGGCGGAGGAGGATCTGG |
| SEQ ID | sequence | AGGAGGAGGGTCGGACATTCAAATGACTCAGTCCCCGTCCT |
| NO: 75 | | CCCTCTCCGCCTCCGTGGGAGATCGCGTCACGATCACGTGC |
| | | AGGGCCAGCCAGAGCATCTCCAGCTACCTGAACTGGTACCA |
| | | GCAGAAGCCAGGGAAGGCACCGAAGCTCCTGATCTACGCCG |
| | | CTAGCTCGCTGCAGTCCGGCGTCCCTTCACGGTTCTCGGGAT |
| | | CGGGCTCAGGCACCGACTTCACCCTGACCATTAGCAGCCTG |
| | | CAGCCGGAGGACTTCGCGACATACTACTGTCAGCAGTCATA |
| | | CTCCACCCCTCTGACCTTCGGCCAAGGGACCAAAGTGGAGA |
| | | TCAAGACCACTACCCCAGCACCGAGGCCACCCACCCCGGCT |
| | | CCTACCATCGCCTCCCAGCCTCTGTCCCTGCGTCCGGAGGCA |
| | | TGTAGACCCGCAGCTGGTGGGGCCGTGCATACCCGGGGTCT |
| | | TGACTTCGCCTGCGATATCTACATTTGGGCCCCTCTGGCTGG |
| | | TACTTGCGGGGTCCTGCTGCTTTCACTCGTGATCACTCTTTA |
| | | CTGTAAGCGCGGTCGGAAGAAGCTGCTGTACATCTTTAAGC |
| | | AACCCTTCATGAGGCCTGTGCAGACTACTCAAGAGGAGGAC |
| | | GGCTGTTCATGCCGGTTCCCAGAGGAGGAGGAAGGCGGCTG |
| | | CGAACTGCGCGTGAAATTCAGCCGCAGCGCAGATGCTCCAG |
| | | CCTACCAGCAGGGGCAGAACCAGCTCTACAACGAACTCAAT |
| | | CTTGGTCGGAGAGAGGAGTACGACGTGCTGGACAAGCGGA |
| | | GAGGACGGGACCCAGAAATGGGCGGGAAGCCGCGCAGAAA |
| | | GAATCCCCAAGAGGGCCTGTACAACGAGCTCCAAAAGGATA |
| | | AGATGGCAGAAGCCTATAGCGAGATTGGTATGAAAGGGGA |
| | | ACGCAGAAGAGGCAAAGGCCACGACGGACTGTACCAGGGA |
| | | CTCAGCACCGCCACCAAGGACACCTATGACGCTCTTCACAT |
| | | GCAGGCCCTGCCGCCTCGG |
| R1G5 | | |
| SEQ ID | HCDR1 | SYAMS |
| NO: 44 | (Kabat) | |
| SEQ ID | HCDR2 | AISGSGGSTYYADSVKG |
| NO: 45 | (Kabat) | |
| SEQ ID | HCDR3 | REWWGESWLFDY |
| NO: 76 | (Kabat) | |
| SEQ ID | HCDR1 | GFTFSSY |
| NO: 47 | (Chothia) | |
| SEQ ID | HCDR2 | SGSGGS |
| NO: 48 | (Chothia) | |
| SEQ ID | HCDR3 | REWWGESWLFDY |
| NO: 76 | (Chothia) | |
| SEQ ID | HCDR1 | GFTFSSYA |
| NO: 49 | (IMGT) | |
| SEQ ID | HCDR2 | ISGSGGST |
| NO: 50 | (IMGT) | |
| SEQ ID | HCDR3 | ARREWWGESWLFDY |
| NO: 77 | (IMGT) | |
| SEQ ID | VH | EVQLLESGGGLVQPGGSLRLSCAASGFTFSSYAMSWVRQAPG |
| NO: 78 | | KGLEWVSAISGSGGSTYYADSVKGRFTISRDNSKNTLYLQMNS |
| | | LRAEDTAVYYCARREWWGESWLFDYWGQGTLVTVSS |
| SEQ ID | DNA VH | GAAGTGCAGTTGCTGGAGTCAGGCGGAGGACTGGTGCAGCC |
| NO: 79 | | CGGAGGATCGCTTCGCTTGAGCTGCGCAGCCTCAGGCTTTA |
| | | CCTTCTCCTCCTACGCCATGTCCTGGGTCAGACAGGCTCCCG |
| | | GGAAGGGACTGGAATGGGTGTCCGCCATTAGCGGTTCCGGC |
| | | GGAAGCACTTACTATGCCGACTCTGTGAAGGGCCGCTTCAC |
| | | TATCTCCCGGGACAACTCCAAGAACACCCTGTATCTCCAAA |
| | | TGAATTCCCTGAGGGCCGAAGATACCGCGGTGTACTACTGC |
| | | GCTAGACGGGAGTGGTGGGGAGAAAGCTGGCTGTTCGACTA |
| | | CTGGGGACAGGGCACTCTCGTGACTGTGTCCTCC |
| SEQ ID | LCDR1 | RASQSISSYLN |
| NO: 54 | (Kabat) | |
| SEQ ID | LCDR2 | AASSLOS |
| NO: 55 | (Kabat) | |
| SEQ ID | LCDR3 | QQSYSTPLT |
| NO: 56 | (Kabat) | |
| SEQ ID | LCDR1 | SQSISSY |
| NO: 57 | (Chothia) | |
| SEQ ID | LCDR2 | AAS |
| NO: 58 | (Chothia) | |
| SEQ ID | LCDR3 | SYSTPL |
| NO: 59 | (Chothia) | |
| SEQ ID | LCDR1 | QSISSY |
| NO: 60 | (IMGT) | |
| SEQ ID | LCDR2 | AAS |
| NO: 58 | (IMGT) | |
| SEQ ID | LCDR3 | QQSYSTPLT |
| NO: 56 | (IMGT) | |
| SEQ ID | VL | DIQMTQSPSSLSASVGDRVTITCRASQSISSYLNWYQQKPGKAP |
| NO: 61 | | KLLIYAASSLQSGVPSRFSGSGSGTDFTLTISSLQPEDFATYYCQ |
| | | QSYSTPLTFGQGTKVEIK |
| SEQ ID | DNA VL | GACATTCAAATGACTCAGTCCCCGTCCTCCCTCTCCGCCTCC |
| NO: 62 | | GTGGGAGATCGCGTCACGATCACGTGCAGGGCCAGCCAGAG |
| | | CATCTCCAGCTACCTGAACTGGTACCAGCAGAAGCCAGGGA |
| | | AGGCACCGAAGCTCCTGATCTACGCCGCTAGCTCGCTGCAG |
| | | TCCGGCGTCCCTTCACGGTTCTCGGGATCGGGCTCAGGCACC |
| | | GACTTCACCCTGACCATTAGCAGCCTGCAGCCGGAGGACTT |
| | | CGCGACATACTACTGTCAGCAGTCATACTCCACCCCTCTGAC |
| | | CTTCGGCCAAGGGACCAAAGTGGAGATCAAG |
| SEQ ID | Linker | GGGGSGGGGSGGGGSGGGGS |
| NO: 63 | | |
| SEQ ID | scFv (VH- | EVQLLESGGGLVQPGGSLRLSCAASGFTFSSYAMSWVRQAPG |
| NO: 80 | linker-VL) | KGLEWVSAISGSGGSTYYADSVKGRFTISRDNSKNTLYLQMNS |
| | | LRAEDTAVYYCARREWWGESWLFDYWGQGTLVTVSSGGGGS |
| | DNA scFv | GGGGSGGGGSGGGGSDIQMTQSPSSLSASVGDRVTITCRASQSI |
| | | SSYLNWYQQKPGKAPKLLIYAASSLQSGVPSRFSGSGSGTDFTL |
| | | TISSLOPEDFATYYCQQSYSTPLTFGQGTKVEIK |
| | | GAAGTGCAGTTGCTGGAGTCAGGCGGAGGACTGGTGCAGCC |
| | | CGGAGGATCGCTTCGCTTGAGCTGCGCAGCCTCAGGCTTTA |
| | | CCTTCTCCTCCTACGCCATGTCCTGGGTCAGACAGGCTCCCG |
| | | GGAAGGGACTGGAATGGGTGTCCGCCATTAGCGGTTCCGGC |
| | | GGAAGCACTTACTATGCCGACTCTGTGAAGGGCCGCTTCAC |
| | | TATCTCCCGGGACAACTCCAAGAACACCCTGTATCTCCAAA |
| | | TGAATTCCCTGAGGGCCGAAGATACCGCGGTGTACTACTGC |
| | | GCTAGACGGGAGTGGTGGGGAGAAAGCTGGCTGTTCGACTA |
| SEQ ID | | CTGGGGACAGGGCACTCTCGTGACTGTGTCCTCCGGTGGTG |
| NO: 81 | | GTGGATCGGGGGGTGGTGGTTCGGGCGGAGGAGGATCTGG |
| | | AGGAGGAGGGTCGGACATTCAAATGACTCAGTCCCCGTCCT |
| | | CCCTCTCCGCCTCCGTGGGAGATCGCGTCACGATCACGTGC |
| | | AGGGCCAGCCAGAGCATCTCCAGCTACCTGAACTGGTACCA |
| | | GCAGAAGCCAGGGAAGGCACCGAAGCTCCTGATCTACGCCG |
| | | CTAGCTCGCTGCAGTCCGGCGTCCCTTCACGGTTCTCGGGAT |
| | | CGGGCTCAGGCACCGACTTCACCCTGACCATTAGCAGCCTG |
| | | CAGCCGGAGGACTTCGCGACATACTACTGTCAGCAGTCATA |
| | | CTCCACCCCTCTGACCTTCGGCCAAGGGACCAAAGTGGAGA |
| | | TCAAG |
| SEQ ID | Full CAR | EVQLLESGGGLVQPGGSLRLSCAASGFTFSSYAMSWVRQAPG |
| NO: 82 | amino acid | KGLEWVSAISGSGGSTYYADSVKGRFTISRDNSKNTLYLQMNS |
| | sequence | LRAEDTAVYYCARREWWGESWLFDYWGQGTLVTVSSGGGGS |
| | | GGGGSGGGGSGGGGSDIQMTQSPSSLSASVGDRVTITCRASQSI |
| | | SSYLNWYQQKPGKAPKLLIYAASSLQSGVPSRFSGSGSGTDFTL |
| | | TISSLOPEDFATYYCQQSYSTPLTFGQGTKVEIKTTTPAPRPPTP |
| | | APTIASQPLSLRPEACRPAAGGAVHTRGLDFACDIYIWAPLAGT |
| | | CGVLLLSLVITLYCKRGRKKLLYIFKQPFMRPVQTTQEEDGCSC |
| | | RFPEEEEGGCELRVKFSRSADAPAYQQGQNQLYNELNLGRREE |
| | | YDVLDKRRGRDPEMGGKPRRKNPQEGLYNELQKDKMAEAYS |
| | | EIGMKGERRRGKGHDGLYQGLSTATKDTYDALHMQALPPR |
| SEQ ID | Full CAR | GAAGTGCAGTTGCTGGAGTCAGGCGGAGGACTGGTGCAGCC |
| NO: 83 | DNA | CGGAGGATCGCTTCGCTTGAGCTGCGCAGCCTCAGGCTTTA |
| | sequence | CCTTCTCCTCCTACGCCATGTCCTGGGTCAGACAGGCTCCCG |
| | | GGAAGGGACTGGAATGGGTGTCCGCCATTAGCGGTTCCGGC |
| | | GGAAGCACTTACTATGCCGACTCTGTGAAGGGCCGCTTCAC |
| | | TATCTCCCGGGACAACTCCAAGAACACCCTGTATCTCCAAA |
| | | TGAATTCCCTGAGGGCCGAAGATACCGCGGTGTACTACTGC |
| | | GCTAGACGGGAGTGGTGGGGAGAAAGCTGGCTGTTCGACTA |
| | | CTGGGGACAGGGCACTCTCGTGACTGTGTCCTCCGGTGGTG |
| | | GTGGATCGGGGGGTGGTGGTTCGGGCGGAGGAGGATCTGG |
| | | AGGAGGAGGGTCGGACATTCAAATGACTCAGTCCCCGTCCT |
| | | CCCTCTCCGCCTCCGTGGGAGATCGCGTCACGATCACGTGC |
| | | AGGGCCAGCCAGAGCATCTCCAGCTACCTGAACTGGTACCA |
| | | GCAGAAGCCAGGGAAGGCACCGAAGCTCCTGATCTACGCCG |
| | | CTAGCTCGCTGCAGTCCGGCGTCCCTTCACGGTTCTCGGGAT |
| | | CGGGCTCAGGCACCGACTTCACCCTGACCATTAGCAGCCTG |
| | | CAGCCGGAGGACTTCGCGACATACTACTGTCAGCAGTCATA |
| | | CTCCACCCCTCTGACCTTCGGCCAAGGGACCAAAGTGGAGA |
| | | TCAAGACCACTACCCCAGCACCGAGGCCACCCACCCCGGCT |
| | | CCTACCATCGCCTCCCAGCCTCTGTCCCTGCGTCCGGAGGCA |
| | | TGTAGACCCGCAGCTGGTGGGGCCGTGCATACCCGGGGTCT |
| | | TGACTTCGCCTGCGATATCTACATTTGGGCCCCTCTGGCTGG |
| | | TACTTGCGGGGTCCTGCTGCTTTCACTCGTGATCACTCTTTA |
| | | CTGTAAGCGCGGTCGGAAGAAGCTGCTGTACATCTTTAAGC |
| | | AACCCTTCATGAGGCCTGTGCAGACTACTCAAGAGGAGGAC |
| | | GGCTGTTCATGCCGGTTCCCAGAGGAGGAGGAAGGCGGCTG |
| | | CGAACTGCGCGTGAAATTCAGCCGCAGCGCAGATGCTCCAG |
| | | CCTACCAGCAGGGGCAGAACCAGCTCTACAACGAACTCAAT |
| | | CTTGGTCGGAGAGAGGAGTACGACGTGCTGGACAAGCGGA |
| | | GAGGACGGGACCCAGAAATGGGCGGGAAGCCGCGCAGAAA |
| | | GAATCCCCAAGAGGGCCTGTACAACGAGCTCCAAAAGGATA |
| | | AGATGGCAGAAGCCTATAGCGAGATTGGTATGAAAGGGGA |
| | | ACGCAGAAGAGGCAAAGGCCACGACGGACTGTACCAGGGA |
| | | CTCAGCACCGCCACCAAGGACACCTATGACGCTCTTCACAT |
| | | GCAGGCCCTGCCGCCTCGG |

TABLE 3
Kabat CDRs of exemplary PALLAS-derived anti-BCMA molecules

| Kabat | HCDR1 | HCDR2 | HCDR3 | LCDR1 | LCDR2 | LCDR3 |
|---|---|---|---|---|---|---|
| R1B6 | SYAMS | AISGSGGSTY | REWVPYDVS | RASQSISSY | AASSL | QQSYST |
| | (SEQ ID | YADSVKG | WYFDY (SEQ | LN (SEQ ID | QS | PLT |
| | NO: 44) | (SEQ ID NO: | ID NO: 46) | NO: 54) | (SEQ | (SEQ ID |
| | | 45) | | | ID NO: | NO: 56) |
| | | | | | 55) | |
| R1F2 | SYAMS | AISGSGGSTY | REWWYDDW | RASQSISSY | AASSL | QQSYST |
| | (SEQ ID | YADSVKG | YLDY (SEQ | LN (SEQ ID | QS | PLT |
| | NO: 44) | (SEQ ID NO: | ID NO: 68) | NO: 54) | (SEQ | (SEQ ID |
| | | 45) | | | ID NO: | NO: 56) |
| | | | | | 55) | |
| R1G5 | SYAMS | AISGSGGSTY | REWWGESW | RASQSISSY | AASSL | QQSYST |
| | (SEQ ID | YADSVKG | LFDY (SEQ | LN (SEQ ID | QS | PLT |
| | NO: 44) | (SEQ ID NO: | ID NO: 76) | NO: 54) | (SEQ | (SEQ ID |
| | | 45) | | | ID NO: | NO: 56) |
| | | | | | 55) | |
| Consensus | SYAMS | AISGSGGSTY | REWX₁X₂X₃X₄ | RASQSISSY | AASSL | QQSYST |
| | (SEQ ID | YADSVKG | X₅X₆WX₇X₈DY, | LN (SEQ ID | QS | PLT |
| | NO: 44) | (SEQ ID NO: | wherein X₁ | NO: 54) | (SEQ | (SEQ ID |
| | | 45) | is absent or V; | | ID NO: | NO: 56) |
| | | | X₂ is absent or | | 55) | |
| | | | P; X₃ is W or | | | |
| | | | Y; X₄ is G, Y, | | | |
| | | | or D; X₅ is E, | | | |
| | | | D, or V; X₆ is S | | | |
| | | | or D; X₇ is L or | | | |
| | | | Y; and X₈ is F | | | |
| | | | or L (SEQ ID | | | |
| | | | NO: 84) | | | |

TABLE 4
Chothia CDRs of exemplary PALLAS-derived anti-BCMA molecules

| Chothia | HCDR1 | HCDR2 | HCDR3 | LCDR1 | LCDR2 | LCDR3 |
|---|---|---|---|---|---|---|
| R1B6 | GFTFSSY | SGSGGS (SEQ | REWVPYDVS | SQSISSY | AAS | SYSTPL |
| | (SEQ ID | ID NO: 48) | WYFDY (SEQ | (SEQ ID | (SEQ | (SEQ ID |
| | NO: 47) | | ID NO: 46) | NO: 57) | ID NO: | NO: 59) |
| | | | | | 58) | |
| R1F2 | GFTFSSY | SGSGGS (SEQ | REWWYDDW | SQSISSY | AAS | SYSTPL |
| | (SEQ ID | ID NO: 48) | YLDY (SEQ ID | (SEQ ID | (SEQ | (SEQ ID |
| | NO: 47) | | NO: 68) | NO: 57) | ID NO: | NO: 59) |
| | | | | | 58) | |
| R1G5 | GFTFSSY | SGSGGS (SEQ | REWWGESWL | SQSISSY | AAS | SYSTPL |
| | (SEQ ID | ID NO: 48) | FDY (SEQ ID | (SEQ ID | (SEQ | (SEQ ID |
| | NO: 47) | | NO: 76) | NO: 57) | ID NO: | NO: 59) |
| | | | | | 58) | |
| Consensus | GFTFSSY | SGSGGS (SEQ | REWX₁X₂X₃X₄ | SQSISSY | AAS | SYSTPL |
| | (SEQ ID | ID NO: 48) | X₅X₆WX₇X₈DY, | (SEQ ID | (SEQ | (SEQ ID |
| | NO: 47) | | wherein X₁ is | NO: 57) | ID NO: | NO: 59) |
| | | | absent or V; X₂ | | 58) | |
| | | | is absent or P; | | | |
| | | | X₃ is W or Y; X₄ | | | |
| | | | is G, Y, or D; X₅ | | | |
| | | | is E, D, or V; X₆ | | | |
| | | | is S or D; X₇ is | | | |
| | | | L or Y; and X₈ | | | |
| | | | is F or L (SEQ | | | |
| | | | ID NO: 84) | | | |

TABLE 5
IMGT CDRs of exemplary PALLAS-derived anti-BCMA molecules

| IMGT | HCDR1 | HCDR2 | HCDR3 | LCDR1 | LCDR2 | LCDR3 |
|---|---|---|---|---|---|---|
| R1B6 | GFTFSSYA | ISGSGGST | ARREWVPYD | QSISSY | AAS (SEQ | QQSYST |
| | (SEQ ID | (SEQ ID NO: | VSWYFDY | (SEQ ID | ID NO: 58) | PLT (SEQ |
| | NO: 49) | 50) | (SEQ ID NO: | NO: 60) | | ID NO: |
| | | | 51) | | | 56) |
| R1F2 | GFTFSSYA | ISGSGGST | ARREWWYDD | QSISSY | AAS (SEQ | QQSYST |
| | (SEQ ID | (SEQ ID NO: | WYLDY (SEQ | (SEQ ID | ID NO: 58) | PLT (SEQ |
| | NO: 49) | 50) | ID NO: 69) | NO: 60) | | ID NO: |
| | | | | | | 56) |
| R1G5 | GFTFSSYA | ISGSGGST | ARREWWGES | QSISSY | AAS (SEQ | QQSYST |
| | (SEQ ID | (SEQ ID NO: | WLFDY (SEQ | (SEQ ID | ID NO: 58) | PLT (SEQ |
| | NO: 49) | 50) | ID NO: 77) | NO: 60) | | ID NO: |
| | | | | | | 56) |
| Consensus | GFTFSSYA | ISGSGGST | ARREWX₁X₂X₃ | QSISSY | AAS (SEQ | QQSYST |
| | (SEQ ID | (SEQ ID NO: | X₄X₅X₆WX₇X₈ | (SEQ ID | ID NO: 58) | PLT (SEQ |
| | NO: 49) | 50) | DY, wherein X₁ | NO: 60) | | ID NO: |
| | | | is absent or V; | | | 56) |
| | | | X₂ is absent or | | | |
| | | | P; X₃ is W or Y; | | | |
| | | | X₄ is G, Y, or D; | | | |
| | | | X₅ is E, D, or V; | | | |
| | | | X₆ is S or D; X₇ | | | |
| | | | is L or Y; and | | | |
| | | | X₈ is F or L | | | |
| | | | (SEQ ID NO: | | | |
| | | | 85) | | | |

TABLE 6
Amino acid and nucleic acid sequences
of exemplary B cell-derived anti-BCMA molecules

| SEQ ID | Name/ | |
|---|---|---|
| NO | Description | Sequence |
| PI61 | | |
| SEQ ID | HCDR1 | SYGMH |
| NO: 86 | (Kabat) | |
| SEQ ID | HCDR2 | VISYDGSNKYYADSVKG |
| NO: 87 | (Kabat) | |
| SEQ ID | HCDR3 | SGYALHDDYYGLDV |
| NO: 88 | (Kabat) | |
| SEQ ID | HCDR1 | GFTFSSY |
| NO: 47 | (Chothia) | |
| SEQ ID | HCDR2 | SYDGSN |
| NO: 89 | (Chothia) | |
| SEQ ID | HCDR3 | SGYALHDDYYGLDV |
| NO: 88 | (Chothia) | |
| SEQ ID | HCDR1 | GFTFSSYG |
| NO: 90 | (IMGT) | |
| SEQ ID | HCDR2 | ISYDGSNK |
| NO: 91 | (IMGT) | |
| SEQ ID | HCDR3 | GGSGYALHDDYYGLDV |
| NO: 92 | (IMGT) | |
| SEQ ID | VH | QVQLQESGGGVVQPGRSLRLSCAASGFTFSSYGMHWVRQAPG |
| NO: 93 | | KGLEWVAVISYDGSNKYYADSVKGRFTISRDNSKNTLYLQMNS |
| | | LRAEDTAVYYCGGSGYALHDDYYGLDVWGQGTLVTVSS |
| SEQ ID | DNA VH | CAAGTGCAGCTGCAGGAATCCGGTGGCGGAGTCGTGCAGCC |
| NO: 94 | | TGGAAGGAGCCTGAGACTCTCATGCGCCGCGTCAGGGTTCAC |
| | | CTTTTCCTCCTACGGGATGCATTGGGTCAGACAGGCCCCCGG |
| | | AAAGGGACTCGAATGGGTGGCTGTGATCAGCTACGACGGCT |
| | | CCAACAAGTACTACGCCGACTCCGTGAAAGGCCGGTTCACTA |
| | | TCTCCCGGGACAACTCCAAGAACACGCTGTATCTGCAAATGA |
| | | ATTCACTGCGCGCGGAGGATACCGCTGTGTACTACTGCGGTG |
| | | GCTCCGGTTACGCCCTGCACGATGACTATTACGGCCTTGACG |
| | | TCTGGGGCCAGGGAACCCTCGTGACTGTGTCCAGC |
| SEQ ID | LCDR1 | TGTSSDVGGYNYVS |
| NO: 95 | (Kabat) | |
| SEQ ID | LCDR2 | DVSNRPS |
| NO: 96 | (Kabat) | |
| SEQ ID | LCDR3 | SSYTSSSTLYV |
| NO: 97 | (Kabat) | |
| SEQ ID | LCDR1 | TSSDVGGYNY |
| NO: 98 | (Chothia) | |
| SEQ ID | LCDR2 | DVS |
| NO: 99 | (Chothia) | |
| SEQ ID | LCDR3 | YTSSSTLY |
| NO: 100 | (Chothia) | |
| SEQ ID | LCDR1 | SSDVGGYNY |
| NO: 101 | (IMGT) | |
| SEQ ID | LCDR2 | DVS |
| NO: 99 | (IMGT) | |
| SEQ ID | LCDR3 | SSYTSSSTLYV |
| NO: 97 | (IMGT) | |
| SEQ ID | VL | QSALTQPASVSGSPGQSITISCTGTSSDVGGYNYVSWYQQHPGK |
| NO: 102 | | APKLMIYDVSNRPSGVSNRFSGSKSGNTASLTISGLQAEDEADY |
| | | YCSSYTSSSTLYVFGSGTKVTVL |
| SEQ ID | DNA VL | CAGAGCGCACTGACTCAGCCGGCATCCGTGTCCGGTAGCCCC |
| NO: 103 | | GGACAGTCGATTACCATCTCCTGTACCGGCACCTCCTCCGAC |
| | | GTGGGAGGGTACAACTACGTGTCGTGGTACCAGCAGCACCC |
| | | AGGAAAGGCCCCTAAGTTGATGATCTACGATGTGTCAAACCG |
| | | CCCGTCTGGAGTCTCCAACCGGTTCTCCGGCTCCAAGTCCGG |
| | | CAACACCGCCAGCCTGACCATTAGCGGGCTGCAAGCCGAGG |
| | | ATGAGGCCGACTACTACTGCTCGAGCTACACATCCTCGAGCA |
| | | CCCTCTACGTGTTCGGCTCGGGGACTAAGGTCACCGTGCTG |
| SEQ ID | Linker | GGGGSGGGGSGGGGS |
| NO: 104 | | |
| SEQ ID | scFv (VH- | QVQLQESGGGVVQPGRSLRLSCAASGFTFSSYGMHWVRQAPG |
| NO: 105 | linker-VL) | KGLEWVAVISYDGSNKYYADSVKGRFTISRDNSKNTLYLQMNS |
| | | LRAEDTAVYYCGGSGYALHDDYYGLDVWGQGTLVTVSSGGG |
| | | GSGGGGSGGGGSQSALTQPASVSGSPGQSITISCTGTSSDVGGY |
| | | NYVSWYQQHPGKAPKLMIYDVSNRPSGVSNRFSGSKSGNTASL |
| | | TISGLQAEDEADYYCSSYTSSSTLYVFGSGTKVTVL |
| SEQ ID | DNA scFv | CAAGTGCAGCTGCAGGAATCCGGTGGCGGAGTCGTGCAGCC |
| NO: 106 | | TGGAAGGAGCCTGAGACTCTCATGCGCCGCGTCAGGGTTCAC |
| | | CTTTTCCTCCTACGGGATGCATTGGGTCAGACAGGCCCCCGG |
| | | AAAGGGACTCGAATGGGTGGCTGTGATCAGCTACGACGGCT |
| | | CCAACAAGTACTACGCCGACTCCGTGAAAGGCCGGTTCACTA |
| | | TCTCCCGGGACAACTCCAAGAACACGCTGTATCTGCAAATGA |
| | | ATTCACTGCGCGCGGAGGATACCGCTGTGTACTACTGCGGTG |
| | | GCTCCGGTTACGCCCTGCACGATGACTATTACGGCCTTGACG |
| | | TCTGGGGCCAGGGAACCCTCGTGACTGTGTCCAGCGGTGGAG |
| | | GAGGTTCGGGCGGAGGAGGATCAGGAGGGGGTGGATCGCAG |
| | | AGCGCACTGACTCAGCCGGCATCCGTGTCCGGTAGCCCCGGA |
| | | CAGTCGATTACCATCTCCTGTACCGGCACCTCCTCCGACGTG |
| | | GGAGGGTACAACTACGTGTCGTGGTACCAGCAGCACCCAGG |
| | | AAAGGCCCCTAAGTTGATGATCTACGATGTGTCAAACCGCCC |
| | | GTCTGGAGTCTCCAACCGGTTCTCCGGCTCCAAGTCCGGCAA |
| | | CACCGCCAGCCTGACCATTAGCGGGCTGCAAGCCGAGGATG |
| | | AGGCCGACTACTACTGCTCGAGCTACACATCCTCGAGCACCC |
| | | TCTACGTGTTCGGCTCGGGGACTAAGGTCACCGTGCTG |
| SEQ ID | Full CAR | QVQLQESGGGVVQPGRSLRLSCAASGFTFSSYGMHWVRQAPG |
| NO: 107 | amino acid | KGLEWVAVISYDGSNKYYADSVKGRFTISRDNSKNTLYLQMNS |
| | sequence | LRAEDTAVYYCGGSGYALHDDYYGLDVWGQGTLVTVSSGGG |
| | | GSGGGGSGGGGSQSALTQPASVSGSPGQSITISCTGTSSDVGGY |
| | | NYVSWYQQHPGKAPKLMIYDVSNRPSGVSNRFSGSKSGNTASL |
| | | TISGLQAEDEADYYCSSYTSSSTLYVFGSGTKVTVLTTTPAPRPP |
| | | TPAPTIASQPLSLRPEACRPAAGGAVHTRGLDFACDIYIWAPLA |
| | | GTCGVLLLSLVITLYCKRGRKKLLYIFKQPFMRPVQTTQEEDGC |
| | | SCRFPEEEEGGCELRVKFSRSADAPAYQQGQNQLYNELNLGRR |
| | | EEYDVLDKRRGRDPEMGGKPRRKNPQEGLYNELQKDKMAEA |
| | | YSEIGMKGERRRGKGHDGLYQGLSTATKDTYDALHMQALPPR |
| SEQ ID | Full CAR | CAAGTGCAGCTGCAGGAATCCGGTGGCGGAGTCGTGCAGCC |
| NO: 108 | DNA | TGGAAGGAGCCTGAGACTCTCATGCGCCGCGTCAGGGTTCAC |
| | sequence | CTTTTCCTCCTACGGGATGCATTGGGTCAGACAGGCCCCCGG |
| | | AAAGGGACTCGAATGGGTGGCTGTGATCAGCTACGACGGCT |
| | | CCAACAAGTACTACGCCGACTCCGTGAAAGGCCGGTTCACTA |
| | | TCTCCCGGGACAACTCCAAGAACACGCTGTATCTGCAAATGA |
| | | ATTCACTGCGCGCGGAGGATACCGCTGTGTACTACTGCGGTG |
| | | GCTCCGGTTACGCCCTGCACGATGACTATTACGGCCTTGACG |
| | | TCTGGGGCCAGGGAACCCTCGTGACTGTGTCCAGCGGTGGAG |
| | | GAGGTTCGGGCGGAGGAGGATCAGGAGGGGGTGGATCGCAG |
| | | AGCGCACTGACTCAGCCGGCATCCGTGTCCGGTAGCCCCGGA |
| | | CAGTCGATTACCATCTCCTGTACCGGCACCTCCTCCGACGTG |
| | | GGAGGGTACAACTACGTGTCGTGGTACCAGCAGCACCCAGG |
| | | AAAGGCCCCTAAGTTGATGATCTACGATGTGTCAAACCGCCC |
| | | GTCTGGAGTCTCCAACCGGTTCTCCGGCTCCAAGTCCGGCAA |
| | | CACCGCCAGCCTGACCATTAGCGGGCTGCAAGCCGAGGATG |
| | | AGGCCGACTACTACTGCTCGAGCTACACATCCTCGAGCACCC |
| | | TCTACGTGTTCGGCTCGGGGACTAAGGTCACCGTGCTGACCA |
| | | CTACCCCAGCACCGAGGCCACCCACCCCGGCTCCTACCATCG |
| | | CCTCCCAGCCTCTGTCCCTGCGTCCGGAGGCATGTAGACCCG |
| | | CAGCTGGTGGGGCCGTGCATACCCGGGGTCTTGACTTCGCCT |
| | | GCGATATCTACATTTGGGCCCCTCTGGCTGGTACTTGCGGGG |
| | | TCCTGCTGCTTTCACTCGTGATCACTCTTTACTGTAAGCGCGG |
| | | TCGGAAGAAGCTGCTGTACATCTTTAAGCAACCCTTCATGAG |
| | | GCCTGTGCAGACTACTCAAGAGGAGGACGGCTGTTCATGCCG |
| | | GTTCCCAGAGGAGGAGGAAGGCGGCTGCGAACTGCGCGTGA |
| | | AATTCAGCCGCAGCGCAGATGCTCCAGCCTACCAGCAGGGG |
| | | CAGAACCAGCTCTACAACGAACTCAATCTTGGTCGGAGAGA |
| | | GGAGTACGACGTGCTGGACAAGCGGAGAGGACGGGACCCAG |
| | | AAATGGGCGGGAAGCCGCGCAGAAAGAATCCCCAAGAGGGC |
| | | CTGTACAACGAGCTCCAAAAGGATAAGATGGCAGAAGCCTA |
| | | TAGCGAGATTGGTATGAAAGGGGAACGCAGAAGAGGCAAAG |
| | | GCCACGACGGACTGTACCAGGGACTCAGCACCGCCACcaaggac |
| | | acctatgacgctcttcacatgcaggccctgccgcctcgg |
| B61-02 | | |
| SEQ ID | HCDR1 | SYGMH |
| NO: 86 | (Kabat) | |
| SEQ ID | HCDR2 | VISYKGSNKYYADSVKG |
| NO: 109 | (Kabat) | |
| SEQ ID | HCDR3 | SGYALHDDYYGLDV |
| NO: 88 | (Kabat) | |
| SEQ ID | HCDR1 | GFTFSSY |
| NO: 47 | (Chothia) | |
| SEQ ID | HCDR2 | SYKGSN |
| NO: 110 | (Chothia) | |
| SEQ ID | HCDR3 | SGYALHDDYYGLDV |
| NO: 88 | (Chothia) | |
| SEQ ID | HCDR1 | GFTFSSYG |
| NO: 90 | (IMGT) | |
| SEQ ID | HCDR2 | ISYKGSNK |
| NO: 111 | (IMGT) | |
| SEQ ID | HCDR3 | GGSGYALHDDYYGLDV |
| NO: 92 | (IMGT) | |
| SEQ ID | VH | QVQLVESGGGVVQPGRSLRLSCAASGFTFSSYGMHWVRQAPG |
| NO: 112 | | KGLEWVAVISYKGSNKYYADSVKGRFTISRDNSKNTLYLQMNS |
| | | LRAEDTAVYYCGGSGYALHDDYYGLDVWGQGTLVTVSS |
| SEQ ID | DNA VH | CAAGTGCAGCTTGTCGAATCGGGAGGCGGAGTGGTGCAGCC |
| NO: 113 | | TGGACGATCGCTCCGGCTCTCATGTGCCGCGAGCGGATTCAC |
| | | CTTCTCGAGCTACGGCATGCACTGGGTCAGACAAGCCCCAGG |
| | | AAAGGGCCTGGAATGGGTGGCTGTCATCTCGTACAAGGGCTC |
| | | AAACAAGTACTACGCCGACTCCGTGAAGGGCCGGTTCACCAT |
| | | CTCCCGCGATAACTCCAAGAATACCCTCTATCTGCAAATGAA |
| | | CAGCCTGAGGGCCGAGGATACTGCAGTGTACTACTGCGGGG |
| | | GTTCAGGCTACGCGCTGCACGACGACTACTACGGATTGGACG |
| | | TCTGGGGCCAAGGAACTCTTGTGACCGTGTCCTCT |
| SEQ ID | LCDR1 | TGTSSDVGGYNYVS |
| NO: 95 | (Kabat) | |
| SEQ ID | LCDR2 | EVSNRLR |
| NO: 114 | (Kabat) | |
| SEQ ID | LCDR3 | SSYTSSSALYV |
| NO: 115 | (Kabat) | |
| SEQ ID | LCDR1 | TSSDVGGYNY |
| NO: 98 | (Chothia) | |
| SEQ ID | LCDR2 | EVS |
| NO: 116 | (Chothia) | |
| SEQ ID | LCDR3 | YTSSSALY |
| NO: 117 | (Chothia) | |
| SEQ ID | LCDR1 | SSDVGGYNY |
| NO: 101 | (IMGT) | |
| SEQ ID | LCDR2 | EVS |
| NO: 116 | (IMGT) | |
| SEQ ID | LCDR3 | SSYTSSSALYV |
| NO: 115 | (IMGT) | |
| SEQ ID | VL | QSALTQPASVSGSPGQSITISCTGTSSDVGGYNYVSWYQQHPGK |
| NO: 118 | | APKLMIYEVSNRLRGVSNRFSGSKSGNTASLTISGLQAEDEADY |
| | | YCSSYTSSSALYVFGSGTKVTVL |
| SEQ ID | DNA VL | CAGAGCGCGCTGACTCAGCCTGCCTCCGTGAGCGGTTCGCCG |
| NO: 119 | | GGACAGTCCATTACCATTTCGTGCACCGGGACCTCCTCCGAC |
| | | GTGGGAGGCTACAACTACGTGTCCTGGTACCAGCAGCATCCC |
| | | GGAAAGGCCCCGAAGCTGATGATCTACGAAGTGTCGAACAG |
| | | ACTGCGGGGAGTCTCCAACCGCTTTTCCGGGTCCAAGTCCGG |
| | | CAACACCGCCAGCCTGACCATCAGCGGGCTCCAGGCAGAAG |
| | | ATGAGGCTGACTATTACTGCTCCTCCTACACGTCAAGCTCCG |
| | | CCCTCTACGTGTTCGGGTCCGGGACCAAAGTCACTGTGCTG |
| SEQ ID | Linker | GGGGSGGGGSGGGGSGGGGS |
| NO: 63 | | |
| SEQ ID | scFv (VH- | QVQLVESGGGVVQPGRSLRLSCAASGFTFSSYGMHWVRQAPG |
| NO: 120 | linker-VL) | KGLEWVAVISYKGSNKYYADSVKGRFTISRDNSKNTLYLQMNS |
| | | LRAEDTAVYYCGGSGYALHDDYYGLDVWGQGTLVTVSSGGG |
| | | GSGGGGGGGGSGGGGSQSALTQPASVSGSPGQSITISCTGTSSD |
| | | VGGYNYVSWYQQHPGKAPKLMIYEVSNRLRGVSNRFSGSKSG |
| | | NTASLTISGLQAEDEADYYCSSYTSSSALYVFGSGTKVTVL |
| SEQ ID | DNA scFv | CAAGTGCAGCTTGTCGAATCGGGAGGCGGAGTGGTGCAGCC |
| NO: 121 | | TGGACGATCGCTCCGGCTCTCATGTGCCGCGAGCGGATTCAC |
| | | CTTCTCGAGCTACGGCATGCACTGGGTCAGACAAGCCCCAGG |
| | | AAAGGGCCTGGAATGGGTGGCTGTCATCTCGTACAAGGGCTC |
| | | AAACAAGTACTACGCCGACTCCGTGAAGGGCCGGTTCACCAT |
| | | CTCCCGCGATAACTCCAAGAATACCCTCTATCTGCAAATGAA |
| | | CAGCCTGAGGGCCGAGGATACTGCAGTGTACTACTGCGGGG |
| | | GTTCAGGCTACGCGCTGCACGACGACTACTACGGATTGGACG |
| | | TCTGGGGCCAAGGAACTCTTGTGACCGTGTCCTCTGGTGGAG |
| | | GCGGATCAGGGGGTGGCGGATCTGGGGGTGGTGGTTCCGGG |
| | | GGAGGAGGATCGCAGAGCGCGCTGACTCAGCCTGCCTCCGT |
| | | GAGCGGTTCGCCGGGACAGTCCATTACCATTTCGTGCACCGG |
| | | GACCTCCTCCGACGTGGGAGGCTACAACTACGTGTCCTGGTA |
| | | CCAGCAGCATCCCGGAAAGGCCCCGAAGCTGATGATCTACG |
| | | AAGTGTCGAACAGACTGCGGGGAGTCTCCAACCGCTTTTCCG |
| | | GGTCCAAGTCCGGCAACACCGCCAGCCTGACCATCAGCGGG |
| | | CTCCAGGCAGAAGATGAGGCTGACTATTACTGCTCCTCCTAC |
| | | ACGTCAAGCTCCGCCCTCTACGTGTTCGGGTCCGGGACCAAA |
| | | GTCACTGTGCTG |
| SEQ ID | Full CAR | QVQLVESGGGVVQPGRSLRLSCAASGFTFSSYGMHWVRQAPG |
| NO: 122 | amino acid | KGLEWVAVISYKGSNKYYADSVKGRFTISRDNSKNTLYLQMNS |
| | sequence | LRAEDTAVYYCGGSGYALHDDYYGLDVWGQGTLVTVSSGGG |
| | | GSGGGGSGGGGSGGGGSQSALTQPASVSGSPGQSITISCTGTSSD |
| | | VGGYNYVSWYQQHPGKAPKLMIYEVSNRLRGVSNRFSGSKSG |
| | | NTASLTISGLQAEDEADYYCSSYTSSSALYVFGSGTKVTVLTTTP |
| | | APRPPTPAPTIASQPLSLRPEACRPAAGGAVHTRGLDFACDIYIW |
| | | APLAGTCGVLLLSLVITLYCKRGRKKLLYIFKQPFMRPVQTTQE |
| | | EDGCSCRFPEEEEGGCELRVKFSRSADAPAYQQGQNQLYNELN |
| | | LGRREEYDVLDKRRGRDPEMGGKPRRKNPQEGLYNELQKDKM |
| | | AEAYSEIGMKGERRRGKGHDGLYQGLSTATKDTYDALHMQAL |
| | | PPR |
| SEQ ID | Full CAR | CAAGTGCAGCTTGTCGAATCGGGAGGCGGAGTGGTGCAGCC |
| NO: 123 | DNA | TGGACGATCGCTCCGGCTCTCATGTGCCGCGAGCGGATTCAC |
| | sequence | CTTCTCGAGCTACGGCATGCACTGGGTCAGACAAGCCCCAGG |
| | | AAAGGGCCTGGAATGGGTGGCTGTCATCTCGTACAAGGGCTC |
| | | AAACAAGTACTACGCCGACTCCGTGAAGGGCCGGTTCACCAT |
| | | CTCCCGCGATAACTCCAAGAATACCCTCTATCTGCAAATGAA |
| | | CAGCCTGAGGGCCGAGGATACTGCAGTGTACTACTGCGGGG |
| | | GTTCAGGCTACGCGCTGCACGACGACTACTACGGATTGGACG |
| | | TCTGGGGCCAAGGAACTCTTGTGACCGTGTCCTCTGGTGGAG |
| | | GCGGATCAGGGGGTGGCGGATCTGGGGGTGGTGGTTCCGGG |
| | | GGAGGAGGATCGCAGAGCGCGCTGACTCAGCCTGCCTCCGT |
| | | GAGCGGTTCGCCGGGACAGTCCATTACCATTTCGTGCACCGG |
| | | GACCTCCTCCGACGTGGGAGGCTACAACTACGTGTCCTGGTA |
| | | CCAGCAGCATCCCGGAAAGGCCCCGAAGCTGATGATCTACG |
| | | AAGTGTCGAACAGACTGCGGGGAGTCTCCAACCGCTTTTCCG |
| | | GGTCCAAGTCCGGCAACACCGCCAGCCTGACCATCAGCGGG |
| | | CTCCAGGCAGAAGATGAGGCTGACTATTACTGCTCCTCCTAC |
| | | ACGTCAAGCTCCGCCCTCTACGTGTTCGGGTCCGGGACCAAA |
| | | GTCACTGTGCTGACCACTACCCCAGCACCGAGGCCACCCACC |
| | | CCGGCTCCTACCATCGCCTCCCAGCCTCTGTCCCTGCGTCCGG |
| | | AGGCATGTAGACCCGCAGCTGGTGGGGCCGTGCATACCCGG |
| | | GGTCTTGACTTCGCCTGCGATATCTACATTTGGGCCCCTCTGG |
| | | CTGGTACTTGCGGGGTCCTGCTGCTTTCACTCGTGATCACTCT |
| | | TTACTGTAAGCGCGGTCGGAAGAAGCTGCTGTACATCTTTAA |
| | | GCAACCCTTCATGAGGCCTGTGCAGACTACTCAAGAGGAGG |
| | | ACGGCTGTTCATGCCGGTTCCCAGAGGAGGAGGAAGGCGGC |
| | | TGCGAACTGCGCGTGAAATTCAGCCGCAGCGCAGATGCTCCA |
| | | GCCTACCAGCAGGGGCAGAACCAGCTCTACAACGAACTCAA |
| | | TCTTGGTCGGAGAGAGGAGTACGACGTGCTGGACAAGCGGA |
| | | GAGGACGGGACCCAGAAATGGGCGGGAAGCCGCGCAGAAA |
| | | GAATCCCCAAGAGGGCCTGTACAACGAGCTCCAAAAGGATA |
| | | AGATGGCAGAAGCCTATAGCGAGATTGGTATGAAAGGGGAA |
| | | CGCAGAAGAGGCAAAGGCCACGACGGACTGTACCAGGGACT |
| | | CAGCACCGCCACCAAGGACACCTATGACGCTCTTCACATGCA |
| | | GGCCCTGCCGCCTCGG |
| B61-10 | | |
| SEQ ID | HCDR1 | SYGMH |
| NO: 86 | (Kabat) | |
| SEQ ID | HCDR2 | VISYKGSNKYYADSVKG |
| NO: 109 | (Kabat) | |
| SEQ ID | HCDR3 | SGYALHDDYYGLDV |
| NO: 88 | (Kabat) | |
| SEQ ID | HCDR1 | GFTFSSY |
| NO: 47 | (Chothia) | |
| SEQ ID | HCDR2 | SYKGSN |
| NO: 110 | (Chothia) | |
| SEQ ID | HCDR3 | SGYALHDDYYGLDV |
| NO: 88 | (Chothia) | |
| SEQ ID | HCDR1 | GFTFSSYG |
| NO: 90 | (IMGT) | |
| SEQ ID | HCDR2 | ISYKGSNK |
| NO: 111 | (IMGT) | |
| SEQ ID | HCDR3 | GGSGYALHDDYYGLDV |
| NO: 92 | (IMGT) | |
| SEQ ID | VH | QVQLVESGGGVVQPGRSLRLSCAASGFTFSSYGMHWVRQAPG |
| NO: 112 | | KGLEWVAVISYKGSNKYYADSVKGRFTISRDNSKNTLYLQMNS |
| | | LRAEDTAVYYCGGSGYALHDDYYGLDVWGQGTLVTVSS |
| SEQ ID | DNA VH | CAAGTGCAGCTTGTCGAATCGGGAGGCGGAGTGGTGCAGCC |
| NO: 113 | | TGGACGATCGCTCCGGCTCTCATGTGCCGCGAGCGGATTCAC |
| | | CTTCTCGAGCTACGGCATGCACTGGGTCAGACAAGCCCCAGG |
| | | AAAGGGCCTGGAATGGGTGGCTGTCATCTCGTACAAGGGCTC |
| | | AAACAAGTACTACGCCGACTCCGTGAAGGGCCGGTTCACCAT |
| | | CTCCCGCGATAACTCCAAGAATACCCTCTATCTGCAAATGAA |
| | | CAGCCTGAGGGCCGAGGATACTGCAGTGTACTACTGCGGGG |
| | | GTTCAGGCTACGCGCTGCACGACGACTACTACGGATTGGACG |
| | | TCTGGGGCCAAGGAACTCTTGTGACCGTGTCCTCT |
| SEQ ID | LCDR1 | TGTSSDVGGYNYVS |
| NO: 95 | (Kabat) | |
| SEQ ID | LCDR2 | EVSNRLR |
| NO: 114 | (Kabat) | |
| SEQ ID | LCDR3 | SSYTSSSTLYV |
| NO: 97 | (Kabat) | |
| SEQ ID | LCDR1 | TSSDVGGYNY |
| NO: 98 | (Chothia) | |
| SEQ ID | LCDR2 | EVS |
| NO: 116 | (Chothia) | |
| SEQ ID | LCDR3 | YTSSSTLY |
| NO: 100 | (Chothia) | |
| SEQ ID | LCDR1 | SSDVGGYNY |
| NO: 101 | (IMGT) | |
| SEQ ID | LCDR2 | EVS |
| NO: 116 | (IMGT) | |
| SEQ ID | LCDR3 | SSYTSSSTLYV |
| NO: 97 | (IMGT) | |
| SEQ ID | VL | QSALTQPASVSGSPGQSITISCTGTSSDVGGYNYVSWYQQHPGK |
| NO: 124 | | APKLMIYEVSNRLRGVSNRFSGSKSGNTASLTISGLQAEDEADY |
| | | YCSSYTSSSTLYVFGSGTKVTVL |
| SEQ ID | DNA VL | CAGAGCGCGCTGACTCAGCCTGCCTCCGTGAGCGGTTCGCCG |
| NO: 125 | | GGACAGTCCATTACCATTTCGTGCACCGGGACCTCCTCCGAC |
| | | GTGGGAGGCTACAACTACGTGTCCTGGTACCAGCAGCATCCC |
| | | GGAAAGGCCCCGAAGCTGATGATCTACGAAGTGTCGAACAG |
| | | ACTGCGGGGAGTCTCCAACCGCTTTTCCGGGTCCAAGTCCGG |
| | | CAACACCGCCAGCCTGACCATCAGCGGGCTCCAGGCAGAAG |
| | | ATGAGGCTGACTATTACTGCTCCTCCTACACGTCAAGCTCCA |
| | | CCCTCTACGTGTTCGGGTCCGGGACCAAAGTCACTGTGCTG |
| SEQ ID | Linker | GGGGSGGGGSGGGGSGGGGS |
| NO: 63 | | |
| SEQ ID | scFv (VH- | QVQLVESGGGVVQPGRSLRLSCAASGFTFSSYGMHWVRQAPG |
| NO: 126 | linker-VL) | KGLEWVAVISYKGSNKYYADSVKGRFTISRDNSKNTLYLQMNS |
| | | LRAEDTAVYYCGGSGYALHDDYYGLDVWGQGTLVTVSSGGG |
| | | GSGGGGSGGGGSGGGGSQSALTQPASVSGSPGQSITISCTGTSSD |
| | | VGGYNYVSWYQQHPGKAPKLMIYEVSNRLRGVSNRFSGSKSG |
| | | NTASLTISGLQAEDEADYYCSSYTSSSTLYVFGSGTKVTVL |
| SEQ ID | DNA scFv | CAAGTGCAGCTTGTCGAATCGGGAGGCGGAGTGGTGCAGCC |
| NO: 127 | | TGGACGATCGCTCCGGCTCTCATGTGCCGCGAGCGGATTCAC |
| | | CTTCTCGAGCTACGGCATGCACTGGGTCAGACAAGCCCCAGG |
| | | AAAGGGCCTGGAATGGGTGGCTGTCATCTCGTACAAGGGCTC |
| | | AAACAAGTACTACGCCGACTCCGTGAAGGGCCGGTTCACCAT |
| | | CTCCCGCGATAACTCCAAGAATACCCTCTATCTGCAAATGAA |
| | | CAGCCTGAGGGCCGAGGATACTGCAGTGTACTACTGCGGGG |
| | | GTTCAGGCTACGCGCTGCACGACGACTACTACGGATTGGACG |
| | | TCTGGGGCCAAGGAACTCTTGTGACCGTGTCCTCTGGTGGAG |
| | | GCGGATCAGGGGGTGGCGGATCTGGGGGTGGTGGTTCCGGG |
| | | GGAGGAGGATCGCAGAGCGCGCTGACTCAGCCTGCCTCCGT |
| | | GAGCGGTTCGCCGGGACAGTCCATTACCATTTCGTGCACCGG |
| | | GACCTCCTCCGACGTGGGAGGCTACAACTACGTGTCCTGGTA |
| | | CCAGCAGCATCCCGGAAAGGCCCCGAAGCTGATGATCTACG |
| | | AAGTGTCGAACAGACTGCGGGGAGTCTCCAACCGCTTTTCCG |
| | | GGTCCAAGTCCGGCAACACCGCCAGCCTGACCATCAGCGGG |
| | | CTCCAGGCAGAAGATGAGGCTGACTATTACTGCTCCTCCTAC |
| | | ACGTCAAGCTCCACCCTCTACGTGTTCGGGTCCGGGACCAAA |
| | | GTCACTGTGCTG |
| SEQ ID | Full CAR | QVQLVESGGGVVQPGRSLRLSCAASGFTFSSYGMHWVRQAPG |
| NO: 128 | amino acid | KGLEWVAVISYKGSNKYYADSVKGRFTISRDNSKNTLYLQMNS |
| | sequence | LRAEDTAVYYCGGSGYALHDDYYGLDVWGQGTLVTVSSGGG |
| | | GSGGGGSGGGGSGGGGSQSALTQPASVSGSPGQSITISCTGTSSD |
| | | VGGYNYVSWYQQHPGKAPKLMIYEVSNRLRGVSNRFSGSKSG |
| | | NTASLTISGLQAEDEADYYCSSYTSSSTLYVFGSGTKVTVLTTTP |
| | | APRPPTPAPTIASQPLSLRPEACRPAAGGAVHTRGLDFACDIYIW |
| | | APLAGTCGVLLLSLVITLYCKRGRKKLLYIFKQPFMRPVQTTQE |
| | | EDGCSCRFPEEEEGGCELRVKFSRSADAPAYQQGQNQLYNELN |
| | | LGRREEYDVLDKRRGRDPEMGGKPRRKNPQEGLYNELQKDKM |
| | | AEAYSEIGMKGERRRGKGHDGLYQGLSTATKDTYDALHMQAL |
| | | PPR |
| SEQ ID | Full CAR | CAAGTGCAGCTTGTCGAATCGGGAGGCGGAGTGGTGCAGCC |
| NO: 129 | DNA | TGGACGATCGCTCCGGCTCTCATGTGCCGCGAGCGGATTCAC |
| | sequence | CTTCTCGAGCTACGGCATGCACTGGGTCAGACAAGCCCCAGG |
| | | AAAGGGCCTGGAATGGGTGGCTGTCATCTCGTACAAGGGCTC |
| | | AAACAAGTACTACGCCGACTCCGTGAAGGGCCGGTTCACCAT |
| | | CTCCCGCGATAACTCCAAGAATACCCTCTATCTGCAAATGAA |
| | | CAGCCTGAGGGCCGAGGATACTGCAGTGTACTACTGCGGGG |
| | | GTTCAGGCTACGCGCTGCACGACGACTACTACGGATTGGACG |
| | | TCTGGGGCCAAGGAACTCTTGTGACCGTGTCCTCTGGTGGAG |
| | | GCGGATCAGGGGGTGGCGGATCTGGGGGTGGTGGTTCCGGG |
| | | GGAGGAGGATCGCAGAGCGCGCTGACTCAGCCTGCCTCCGT |
| | | GAGCGGTTCGCCGGGACAGTCCATTACCATTTCGTGCACCGG |
| | | GACCTCCTCCGACGTGGGAGGCTACAACTACGTGTCCTGGTA |
| | | CCAGCAGCATCCCGGAAAGGCCCCGAAGCTGATGATCTACG |
| | | AAGTGTCGAACAGACTGCGGGGAGTCTCCAACCGCTTTTCCG |
| | | GGTCCAAGTCCGGCAACACCGCCAGCCTGACCATCAGCGGG |
| | | CTCCAGGCAGAAGATGAGGCTGACTATTACTGCTCCTCCTAC |
| | | ACGTCAAGCTCCACCCTCTACGTGTTCGGGTCCGGGACCAAA |
| | | GTCACTGTGCTGACCACTACCCCAGCACCGAGGCCACCCACC |
| | | CCGGCTCCTACCATCGCCTCCCAGCCTCTGTCCCTGCGTCCGG |
| | | AGGCATGTAGACCCGCAGCTGGTGGGGCCGTGCATACCCGG |
| | | GGTCTTGACTTCGCCTGCGATATCTACATTTGGGCCCCTCTGG |
| | | CTGGTACTTGCGGGGTCCTGCTGCTTTCACTCGTGATCACTCT |
| | | TTACTGTAAGCGCGGTCGGAAGAAGCTGCTGTACATCTTTAA |
| | | GCAACCCTTCATGAGGCCTGTGCAGACTACTCAAGAGGAGG |
| | | ACGGCTGTTCATGCCGGTTCCCAGAGGAGGAGGAAGGCGGC |
| | | TGCGAACTGCGCGTGAAATTCAGCCGCAGCGCAGATGCTCCA |
| | | GCCTACCAGCAGGGGCAGAACCAGCTCTACAACGAACTCAA |
| | | TCTTGGTCGGAGAGAGGAGTACGACGTGCTGGACAAGCGGA |
| | | GAGGACGGGACCCAGAAATGGGCGGGAAGCCGCGCAGAAA |
| | | GAATCCCCAAGAGGGCCTGTACAACGAGCTCCAAAAGGATA |
| | | AGATGGCAGAAGCCTATAGCGAGATTGGTATGAAAGGGGAA |
| | | CGCAGAAGAGGCAAAGGCCACGACGGACTGTACCAGGGACT |
| | | CAGCACCGCCACCAAGGACACCTATGACGCTCTTCACATGCA |
| | | GGCCCTGCCGCCTCGG |

TABLE 7
Kabat CDRs of exemplary B cell-derived anti-BCMA molecules

| Kabat | HCDR1 | HCDR2 | HCDR3 | LCDR1 | LCDR2 | LCDR3 |
|---|---|---|---|---|---|---|
| PI61 | SYGMH | VISYDGSN | SGYALHDD | TGTSSDV | DVSNRPS | SSYTSSS |
| | (SEQ ID | KYYADSV | YYGLDV | GGYNYVS | (SEQ ID NO: | TLYV |
| | NO: 86) | KG (SEQ | (SEQ ID NO: | (SEQ ID | 96) | (SEQ ID |
| | | ID NO: 87) | 88) | NO: 95) | | NO: 97) |
| B61- | SYGMH | VISYKGSN | SGYALHDD | TGTSSDV | EVSNRLR | SSYTSSS |
| 02 | (SEQ ID | KYYADSV | YYGLDV | GGYNYVS | (SEQ ID NO: | ALYV |
| | NO: 86) | KG (SEQ | (SEQ ID NO: | (SEQ ID | 114) | (SEQ ID |
| | | ID NO: 109) | 88) | NO: 95) | | NO: 115) |
| B61- | SYGMH | VISYKGSN | SGYALHDD | TGTSSDV | EVSNRLR | SSYTSSS |
| 10 | (SEQ ID | KYYADSV | YYGLDV | GGYNYVS | (SEQ ID NO: | TLYV |
| | NO: 86) | KG (SEQ | (SEQ ID NO: | (SEQ ID | 114) | (SEQ ID |
| | | ID NO: 109) | 88) | NO: 95) | | NO: 97) |
| Consensus | SYGMH | VISYXGSN | SGYALHDD | TGTSSDV | X₁VSNRX₂X₃, | SSYTSSS |
| | (SEQ ID | KYYADSV | YYGLDV | GGYNYVS | wherein X₁ is | XLYV, |
| | NO: 86) | KG, | (SEQ ID NO: | (SEQ ID | D or E; X₂ is P | wherein X |
| | | wherein X is | 88) | NO: 95) | or L; and X₃ is | is T or A |
| | | D or K | | | S or R (SEQ | (SEQ ID |
| | | (SEQ ID | | | ID NO: 131) | NO: 132) |
| | | NO: 130) | | | | |

TABLE 8
Chothia CDRs of exemplary B cell-derived anti-BCMA molecules

| Chothia | HCDR1 | HCDR2 | HCDR3 | LCDR1 | LCDR2 | LCDR3 |
|---|---|---|---|---|---|---|
| PI61 | GFTFS | SYDGSN | SGYALHDDY | TSSDVGG | DVS (SEQ | YTSSSTLY |
| | SY | (SEQ ID NO: | YGLDV (SEQ | YNY (SEQ | ID NO: 99) | (SEQ ID |
| | (SEQ | 89) | ID NO: 88) | ID NO: 98) | | NO: 100) |
| | ID NO: | | | | | |
| | 47 | | | | | |
| B61-02 | GFTFS | SYKGSN | SGYALHDDY | TSSDVGG | EVS (SEQ | YTSSSALY |
| | SY | (SEQ ID NO: | YGLDV (SEQ | YNY (SEQ | ID NO: | (SEQ ID |
| | (SEQ | 110) | ID NO: 88) | ID NO: 98) | 116) | NO: 117) |
| | ID NO: | | | | | |
| | 47) | | | | | |
| B61-10 | GFTFS | SYKGSN | SGYALHDDY | TSSDVGG | EVS (SEQ | YTSSSTLY |
| | SY | (SEQ ID NO: | YGLDV (SEQ | YNY (SEQ | ID NO: | (SEQ ID |
| | (SEQ | 110) | ID NO: 88) | ID NO: 98) | 116) | NO: 100) |
| | ID NO: | | | | | |
| | 47) | | | | | |
| Con- | GFTFS | SYXGSN, | SGYALHDDY | TSSDVGG | XVS, | YTSSSXLY, |
| sensus | SY | wherein X | YGLDV (SEQ | YNY (SEQ | wherein X | wherein X |
| | (SEQ | is D or K | ID NO: 88) | ID NO: 98) | is D or E | is T or A |
| | ID NO: | (SEQ | | | (SEQ ID | (SEQ ID |
| | 47) | ID NO: 133) | | | NO: 134) | NO: 135) |

TABLE 9
IMGT CDRs of exemplary B cell-derived anti-BCMA molecules

| IMGT | HCDR1 | HCDR2 | HCDR3 | LCDR1 | LCDR2 | LCDR3 |
|---|---|---|---|---|---|---|
| PI61 | GFTFSSY | ISYDGSNK | GGSGYALHD | SSDVGGYN | DVS | SSYTSSST |
| | G (SEQ ID | (SEQ ID NO: | DYYGLDV | Y (SEQ ID | (SEQ ID | LYV (SEQ |
| | NO: 90) | 91) | (SEQ ID NO: | NO: 101) | NO: 99) | ID NO: 97) |
| | | | 92) | | | |
| B61-02 | GFTFSSY | ISYKGSNK | GGSGYALHD | SSDVGGYN | EVS | SSYTSSS |
| | G (SEQ ID | (SEQ ID NO: | DYYGLDV | Y (SEQ ID | (SEQ ID | ALYV |
| | NO: 90) | 111) | (SEQ ID NO: | NO: 101) | NO: 116) | (SEQ ID |
| | | | 92) | | | NO: 115) |
| B61-10 | GFTFSSY | ISYKGSNK | GGSGYALHD | SSDVGGYN | EVS | SSYTSSST |
| | G (SEQ ID | (SEQ ID NO: | DYYGLDV | Y (SEQ ID | (SEQ ID | LYV (SEQ |
| | NO: 90) | 111) | (SEQ ID NO: | NO: 101) | NO: 116) | ID NO: 97) |
| | | | 92) | | | |
| Con- | GFTFSSY | ISYXGSNK, | GGSGYALHD | SSDVGGYN | XVS, | SSYTSSS |
| sensus | G (SEQ ID | wherein X | DYYGLDV | Y (SEQ ID | wherein X | XLYV, |
| | NO: 90) | is D or K | (SEQ ID NO: | NO: 101) | is D or E | wherein X |
| | | (SEQ | 92) | | (SEQ ID | is T or A |
| | | ID NO: 136) | | | NO: 134) | (SEQ ID |
| | | | | | | NO: 132) |

TABLE 14
Amino acid and nucleic acid sequences of exemplary anti-BCMA molecules based on PI61

| Identification | Protein sequence | DNA sequence (5′-3′) |
|---|---|---|
| Signal peptide | MALPVTALLLPLALLLHAA | Atggccctccctgtcaccgctctgttgctgccgcttgctctgctg |
| | RP (SEQ ID NO: 2) | ctccacgcagegegaccg (SEQ ID NO: 252) |
| ScFv PI61 | QVQLQESGGGVVQPGRSLR | CaggtacaattgcaggagtctggaggcggtgtgGtgcaacc |
| | LSCAASGFTFSSYGMHWVR | cggtcgcagcttgcgcctgagttgtGctgcgtctggatttacatt |
| | QAPGKGLEWVAVISYDGSN | ttcatcttacggaAtgcattgggtacgccaggcaccggggaa |
| | KYYADSVKGRFTISRDNSK | aggcCttgaatgggtggctgtaatttcatacgatggtTccaac |
| | NTLYLQMNSLRAEDTAVYY | aaatactatgctgactcagtcaagggtCgatttacaattagtcg |
| | CGGSGYALHDDYYGLDVW | ggacaactccaagaacAccctttatcttcaaatgaattcccttag |
| | GQGTLVTVSSGGGGSGGGG | agcaGaggatacggcggtctattactgtggtggcagtGgttat |
| | SGGGGSQSALTQPASVSGSP | gcacttcatgatgattactatggcttgGatgtctgggggcaagg |
| | GQSITISCTGTSSDVGGYNY | gacgcttgtaactgtaTcctctggtggtggtggtagtggtggg |
| | VSWYQQHPGKAPKLMIYD | ggaggcTccggcggtggcggctctcaatctgctctgactCaa |
| | VSNRPSGVSNRFSGSKSGNT | ccagcaagcgtatcagggtcaccgggacagAgtattaccata |
| | ASLTISGLQAEDEADYYCSS | agttgcacggggacctctagcGatgtaggggggtataattatg |
| | YTSSSTLYVFGSGTKVTVL | tatcttggtatCaacaacaccccgggaaagcccctaaattgatg |
| | (SEQ ID NO: 105) | AtctacgacgtgagcaatcgacctagtggcgtaTcaaatcgc |
| | | ttctctggtagcaagagtgggaatAcggcgtcccttactattag |
| | | cggattgcaagcaGaagatgaggccgattactactgcagctc |
| | | ctatActagctcttctacattgtacgtctttgggagcggaacaaa |
| | | agtaacagtactc (SEQ ID NO: 253) |
| Transmembrane | TTTPAPRPPTPAPTIASQPLS | AcaacaacacctgccccgagaccgcctacaccaGccccga |
| domain and hinge | LRPEACRPAAGGAVHTRGL | ctattgccagccagcctctgagcctcAggcctgaggcctgtag |
| | DFACDIYIWAPLAGTCGVLL | gcccgcagcgggcggcGcagttcatacacggggcttggattt |
| | LSLVITLYC (SEQ ID NO: | cgcttgtGatatttatatttgggctcctttggcggggacaTgtgg |
| | 202) | cgtgctgcttctgtcacttgttattacactgtactgt (SEQ ID |
| | | NO: 254) |
| 4-1BB | KRGRKKLLYIFKQPFMRPV | AaacgcgggcgaaaaaaattgctgtatatttttAagcagccat |
| | QTTQEEDGCSCRFPEEEEGG | ttatgaggcccgttcagacgacgCaggaggaggacggttgct |
| | CEL (SEQ ID NO: 14) | cttgcaggttcccagaagaggaagaagggggctgtgaattg |
| | | (SEQ ID NO: 255) |
| CD3zeta | RVKFSRSADAPAYQQGQNQ | CgggttaaattttcaagatccgcagacgctccaGcataccaac |
| | LYNELNLGRREEYDVLDKR | agggacaaaaccaactctataacGagctgaatcttggaagaa |
| | RGRDPEMGGKPRRKNPQEG | gggaggaatatgatGtgctggataaacggcgcggtagagatc |
| | LYNELQKDKMAEAYSEIGM | cggagAtgggcggaaaaccaaggcgaaaaaaccctcagG |
| | KGERRRGKGHDGLYQGLST | agggactctacaacgaactgcagaaagacaaaAtggcggag |
| | ATKDTYDALHMQALPPR | gcttattccgaaataggcatgaagGgcgagcggaggcgagg |
| | (SEQ ID NO: 20) | gaaagggcacgacggaCtgtatcaaggcctctcaaccgcga |
| | | ctaaggatAcgtacgacgccctgcacatgcaggccctgcctc |
| | | cgaga (SEQ ID NO: 256) |
| PI61 full CAR | MALPVTALLLPLALLLHAA | ATGGCCCTCCCTGTCACCGCTCTGTTG |
| construct | RPQVQLQESGGGVVQPGRS | CTGCCGCTTGCTCTGCTGCTCCACGCA |
| | LRLSCAASGFTFSSYGMHW | GCGCGACCGCAGGTACAATTGCAGGA |
| | VRQAPGKGLEWVAVISYDG | GTCTGGAGGCGGTGTGGTGCAACCCG |
| | SNKYYADSVKGRFTISRDNS | GTCGCAGCTTGCGCCTGAGTTGTGCTG |
| | KNTLYLQMNSLRAEDTAVY | CGTCTGGATTTACATTTTCATCTTACGG |
| | YCGGSGYALHDDYYGLDV | AATGCATTGGGTACGCCAGGCACCGG |
| | WGQGTLVTVSSGGGGSGG | GGAAAGGCCTTGAATGGGTGGCTGTA |
| | GGSGGGGSQSALTQPASVS | ATTTCATACGATGGTTCCAACAAATAC |
| | GSPGQSITISCTGTSSDVGGY | TATGCTGACTCAGTCAAGGGTCGATTT |
| | NYVSWYQQHPGKAPKLMI | ACAATTAGTCGGGACAACTCCAAGAA |
| | YDVSNRPSGVSNRFSGSKSG | CACCCTTTATCTTCAAATGAATTCCCTT |
| | NTASLTISGLQAEDEADYYC | AGAGCAGAGGATACGGCGGTCTATTA |
| | SSYTSSSTLYVFGSGTKVTV | CTGTGGTGGCAGTGGTTATGCACTTCA |
| | LTTTPAPRPPTPAPTIASQPL | TGATGATTACTATGGCTTGGATGTCTG |
| | SLRPEACRPAAGGAVHTRG | GGGGCAAGGGACGCTTGTAACTGTATC |
| | LDFACDIYIWAPLAGTCGVL | CTCTGGTGGTGGTGGTAGTGGTGGGGG |
| | LLSLVITLYCKRGRKKLLYI | AGGCTCCGGCGGTGGCGGCTCTCAATC |
| | FKQPFMRPVQTTQEEDGCS | TGCTCTGACTCAACCAGCAAGCGTATC |
| | CRFPEEEEGGCELRVKFSRS | AGGGTCACCGGGACAGAGTATTACCA |
| | ADAPAYQQGQNQLYNELN | TAAGTTGCACGGGGACCTCTAGCGATG |
| | LGRREEYDVLDKRRGRDPE | TAGGGGGGTATAATTATGTATCTTGGT |
| | MGGKPRRKNPQEGLYNELQ | ATCAACAACACCCCGGGAAAGCCCCT |
| | KDKMAEAYSEIGMKGERRR | AAATTGATGATCTACGACGTGAGCAAT |
| | GKGHDGLYQGLSTATKDTY | CGACCTAGTGGCGTATCAAATCGCTTC |
| | DALHMQALPPR (SEQ ID | TCTGGTAGCAAGAGTGGGAATACGGC |
| | NO: 257) | GTCCCTTACTATTAGCGGATTGCAAGC |
| | | AGAAGATGAGGCCGATTACTACTGCA |
| | | GCTCCTATACTAGCTCTTCTACATTGTA |
| | | CGTCTTTGGGAGCGGAACAAAAGTAA |
| | | CAGTACTCACAACAACACCTGCCCCGA |
| | | GACCGCCTACACCAGCCCCGACTATTG |
| | | CCAGCCAGCCTCTGAGCCTCAGGCCTG |
| | | AGGCCTGTAGGCCCGCAGCGGGCGGC |
| | | GCAGTTCATACACGGGGCTTGGATTTC |
| | | GCTTGTGATATTTATATTTGGGCTCCTT |
| | | TGGCGGGGACATGTGGCGTGCTGCTTC |
| | | TGTCACTTGTTATTACACTGTACTGTA |
| | | AACGCGGGCGAAAAAAATTGCTGTAT |
| | | ATTTTTAAGCAGCCATTTATGAGGCCC |
| | | GTTCAGACGACGCAGGAGGAGGACGG |
| | | TTGCTCTTGCAGGTTCCCAGAAGAGGA |
| | | AGAAGGGGGCTGTGAATTGCGGGTTA |
| | | AATTTTCAAGATCCGCAGACGCTCCAG |
| | | CATACCAACAGGGACAAAACCAACTC |
| | | TATAACGAGCTGAATCTTGGAAGAAG |
| | | GGAGGAATATGATGTGCTGGATAAAC |
| | | GGCGCGGTAGAGATCCGGAGATGGGC |
| | | GGAAAACCAAGGCGAAAAAACCCTCA |
| | | GGAGGGACTCTACAACGAACTGCAGA |
| | | AAGACAAAATGGCGGAGGCTTATTCC |
| | | GAAATAGGCATGAAGGGCGAGCGGAG |
| | | GCGAGGGAAAGGGCACGACGGACTGT |
| | | ATCAAGGCCTCTCAACCGCGACTAAGG |
| | | ATACGTACGACGCCCTGCACATGCAGG |
| | | CCCTGCCTCCGAGA (SEQ ID NO: 258) |
| PI61 mature | QVQLQESGGGVVQPGRSLR | |
| CAR protein | LSCAASGFTFSSYGMHWVR | |
| | QAPGKGLEWVAVISYDGSN | |
| | KYYADSVKGRFTISRDNSK | |
| | NTLYLQMNSLRAEDTAVYY | |
| | CGGSGYALHDDYYGLDVW | |
| | GQGTLVTVSSGGGGSGGGG | |
| | SGGGGSQSALTQPASVSGSP | |
| | GQSITISCTGTSSDVGGYNY | |
| | VSWYQQHPGKAPKLMIYD | |
| | VSNRPSGVSNRFSGSKSGNT | |
| | ASLTISGLQAEDEADYYCSS | |
| | YTSSSTLYVFGSGTKVTVLT | |
| | TTPAPRPPTPAPTIASQPLSL | |
| | RPEACRPAAGGAVHTRGLD | |
| | FACDIYIWAPLAGTCGVLLL | |
| | SLVITLYCKRGRKKLLYIFK | |
| | QPFMRPVQTTQEEDGCSCR | |
| | FPEEEEGGCELRVKFSRSAD | |
| | APAYQQGQNQLYNELNLG | |
| | RREEYDVLDKRRGRDPEMG | |
| | GKPRRKNPQEGLYNELQKD | |
| | KMAEAYSEIGMKGERRRGK | |
| | GHDGLYQGLSTATKDTYDA | |
| | LHMQALPPR (SEQ ID NO: | |
| | 107) | |

TABLE 10
Amino acid and nucleic acid sequences of exemplary hybridoma-derived anti-BCMA
molecules

| SEQ ID | Name/ | |
|---|---|---|
| NO | Description | Sequence |
| Hy03 | | |
| SEQ ID | HCDR1 | GFWMS |
| NO: 137 | (Kabat) | |
| SEQ ID | HCDR2 | NIKQDGSEKYYVDSVRG |
| NO: 138 | (Kabat) | |
| SEQ ID | HCDR3 | ALDYYGMDV |
| NO: 139 | (Kabat) | |
| SEQ ID | HCDR1 | GFTFSGF |
| NO: 140 | (Chothia) | |
| SEQ ID | HCDR2 | KQDGSE |
| NO: 141 | (Chothia) | |
| SEQ ID | HCDR3 | ALDYYGMDV |
| NO: 139 | (Chothia) | |
| SEQ ID | HCDR1 | GFTFSGFW |
| NO: 142 | (IMGT) | |
| SEQ ID | HCDR2 | IKQDGSEK |
| NO: 143 | (IMGT) | |
| SEQ ID | HCDR3 | ARALDYYGMDV |
| NO: 144 | (IMGT) | |
| SEQ ID | VH | EVQLVESGGGLVQPGGSLRLSCAASGFTFSGFWMSWVRQAPGKG |
| NO: 145 | | LEWVANIKQDGSEKYYVDSVRGRFTISRDNAKNSLYLQMNSLRA |
| | | EDTAVYYCARALDYYGMDVWGQGTTVTVSS |
| SEQ ID | DNA VH | GAAGTGCAACTGGTGGAGAGCGGTGGAGGGCTTGTCCAGCCC |
| NO: 146 | | GGAGGATCGCTGCGGCTGTCCTGTGCTGCGTCCGGGTTCACCT |
| | | TCTCCGGCTTCTGGATGTCCTGGGTCAGACAGGCACCGGGAAA |
| | | GGGCCTCGAATGGGTGGCCAACATCAAGCAGGATGGCTCCGA |
| | | GAAGTACTACGTCGACTCCGTGAGAGGCCGCTTCACCATCTCC |
| | | CGGGACAACGCCAAGAACTCGCTGTACCTCCAAATGAATAGCC |
| | | TCAGGGCGGAAGATACTGCTGTGTATTACTGCGCACGCGCCCT |
| | | TGACTACTACGGCATGGACGTCTGGGGCCAAGGGACCACTGTG |
| | | ACCGTGTCTAGC |
| SEQ ID | LCDR1 | RSSQSLLDSDDGNTYLD |
| NO: 147 | (Kabat) | |
| SEQ ID | LCDR2 | TLSYRAS |
| NO: 148 | (Kabat) | |
| SEQ ID | LCDR3 | TQRLEFPSIT |
| NO: 149 | (Kabat) | |
| SEQ ID | LCDR1 | SQSLLDSDDGNTY |
| NO: 150 | (Chothia) | |
| SEQ ID | LCDR2 | TLS |
| NO: 151 | (Chothia) | |
| SEQ ID | LCDR3 | RLEFPSI |
| NO: 152 | (Chothia) | |
| SEQ ID | LCDR1 | QSLLDSDDGNTY |
| NO: 153 | (IMGT) | |
| SEQ ID | LCDR2 | TLS |
| NO: 151 | (IMGT) | |
| SEQ ID | LCDR3 | TQRLEFPSIT |
| NO: 149 | (IMGT) | |
| SEQ ID | VL | DIVMTQTPLSLPVTPGEPASISCRSSQSLLDSDDGNTYLDWYLQKP |
| NO: 154 | | GQSPRLLIYTLSYRASGVPDRFSGSGSGTDFTLKISRVEAEDVGLY |
| | | YCTQRLEFPSITFGQGTRLEIK |
| SEQ ID | DNA VL | GATATCGTGATGACCCAGACTCCCCTGTCCCTGCCTGTGACTCC |
| NO: 155 | | CGGAGAACCAGCCTCCATTTCCTGCCGGTCCTCCCAGTCCCTGC |
| | | TGGACAGCGACGACGGCAACACTTACCTGGACTGGTACTTGCA |
| | | GAAGCCGGGCCAATCGCCTCGCCTGCTGATCTATACCCTGTCA |
| | | TACCGGGCCTCAGGAGTGCCTGACCGCTTCTCGGGATCAGGGA |
| | | GCGGGACCGATTTCACCCTGAAAATTTCCCGAGTGGAAGCCGA |
| | | GGACGTCGGACTGTACTACTGCACCCAGCGCCTCGAATTCCCG |
| | | TCGATTACGTTTGGACAGGGTACCCGGCTTGAGATCAAG |
| SEQ ID | Linker | GGGGSGGGGSGGGGSGGGGS |
| NO: 63 | | |
| SEQ ID | scFv (VH- | EVQLVESGGGLVQPGGSLRLSCAASGFTFSGFWMSWVRQAPGKG |
| NO: 156 | linker-VL) | LEWVANIKQDGSEKYYVDSVRGRFTISRDNAKNSLYLQMNSLRA |
| | | EDTAVYYCARALDYYGMDVWGQGTTVTVSSGGGGSGGGGSGG |
| | | GGSGGGGSDIVMTQTPLSLPVTPGEPASISCRSSQSLLDSDDGNTY |
| | | LDWYLQKPGQSPRLLIYTLSYRASGVPDRFSGSGSGTDFTLKISRV |
| | | EAEDVGLYYCTQRLEFPSITFGQGTRLEIK |
| SEQ ID | DNA scFv | GAAGTGCAACTGGTGGAGAGCGGTGGAGGGCTTGTCCAGCCC |
| NO: 157 | | GGAGGATCGCTGCGGCTGTCCTGTGCTGCGTCCGGGTTCACCT |
| | | TCTCCGGCTTCTGGATGTCCTGGGTCAGACAGGCACCGGGAAA |
| | | GGGCCTCGAATGGGTGGCCAACATCAAGCAGGATGGCTCCGA |
| | | GAAGTACTACGTCGACTCCGTGAGAGGCCGCTTCACCATCTCC |
| | | CGGGACAACGCCAAGAACTCGCTGTACCTCCAAATGAATAGCC |
| | | TCAGGGCGGAAGATACTGCTGTGTATTACTGCGCACGCGCCCT |
| | | TGACTACTACGGCATGGACGTCTGGGGCCAAGGGACCACTGTG |
| | | ACCGTGTCTAGCGGAGGCGGAGGTTCAGGGGGCGGTGGATCA |
| | | GGCGGAGGAGGATCGGGGGGTGGTGGATCGGATATCGTGATG |
| | | ACCCAGACTCCCCTGTCCCTGCCTGTGACTCCCGGAGAACCAG |
| | | CCTCCATTTCCTGCCGGTCCTCCCAGTCCCTGCTGGACAGCGAC |
| | | GACGGCAACACTTACCTGGACTGGTACTTGCAGAAGCCGGGCC |
| | | AATCGCCTCGCCTGCTGATCTATACCCTGTCATACCGGGCCTCA |
| | | GGAGTGCCTGACCGCTTCTCGGGATCAGGGAGCGGGACCGATT |
| | | TCACCCTGAAAATTTCCCGAGTGGAAGCCGAGGACGTCGGACT |
| | | GTACTACTGCACCCAGCGCCTCGAATTCCCGTCGATTACGTTTG |
| | | GACAGGGTACCCGGCTTGAGATCAAG |
| SEQ ID | Full CAR | EVQLVESGGGLVQPGGSLRLSCAASGFTFSGFWMSWVRQAPGKG |
| NO: 158 | amino acid | LEWVANIKQDGSEKYYVDSVRGRFTISRDNAKNSLYLQMNSLRA |
| | sequence | EDTAVYYCARALDYYGMDVWGQGTTVTVSSGGGGSGGGGSGG |
| | | GGSGGGGSDIVMTQTPLSLPVTPGEPASISCRSSQSLLDSDDGNTY |
| | | LDWYLQKPGQSPRLLIYTLSYRASGVPDRFSGSGSGTDFTLKISRV |
| | | EAEDVGLYYCTQRLEFPSITFGQGTRLEIKTTTPAPRPPTPAPTIAS |
| | | QPLSLRPEACRPAAGGAVHTRGLDFACDIYIWAPLAGTCGVLLLS |
| | | LVITLYCKRGRKKLLYIFKQPFMRPVQTTQEEDGCSCRFPEEEEGG |
| | | CELRVKFSRSADAPAYQQGQNQLYNELNLGRREEYDVLDKRRGR |
| | | DPEMGGKPRRKNPQEGLYNELQKDKMAEAYSEIGMKGERRRGK |
| | | GHDGLYQGLSTATKDTYDALHMQALPPR |
| SEQ ID | Full CAR | GAAGTGCAACTGGTGGAGAGCGGTGGAGGGCTTGTCCAGCCC |
| NO: 159 | DNA | GGAGGATCGCTGCGGCTGTCCTGTGCTGCGTCCGGGTTCACCT |
| | sequence | TCTCCGGCTTCTGGATGTCCTGGGTCAGACAGGCACCGGGAAA |
| | | GGGCCTCGAATGGGTGGCCAACATCAAGCAGGATGGCTCCGA |
| | | GAAGTACTACGTCGACTCCGTGAGAGGCCGCTTCACCATCTCC |
| | | CGGGACAACGCCAAGAACTCGCTGTACCTCCAAATGAATAGCC |
| | | TCAGGGCGGAAGATACTGCTGTGTATTACTGCGCACGCGCCCT |
| | | TGACTACTACGGCATGGACGTCTGGGGCCAAGGGACCACTGTG |
| | | ACCGTGTCTAGCGGAGGCGGAGGTTCAGGGGGCGGTGGATCA |
| | | GGCGGAGGAGGATCGGGGGGTGGTGGATCGGATATCGTGATG |
| | | ACCCAGACTCCCCTGTCCCTGCCTGTGACTCCCGGAGAACCAG |
| | | CCTCCATTTCCTGCCGGTCCTCCCAGTCCCTGCTGGACAGCGAC |
| | | GACGGCAACACTTACCTGGACTGGTACTTGCAGAAGCCGGGCC |
| | | AATCGCCTCGCCTGCTGATCTATACCCTGTCATACCGGGCCTCA |
| | | GGAGTGCCTGACCGCTTCTCGGGATCAGGGAGCGGGACCGATT |
| | | TCACCCTGAAAATTTCCCGAGTGGAAGCCGAGGACGTCGGACT |
| | | GTACTACTGCACCCAGCGCCTCGAATTCCCGTCGATTACGTTTG |
| | | GACAGGGTACCCGGCTTGAGATCAAGACCACTACCCCAGCACC |
| | | GAGGCCACCCACCCCGGCTCCTACCATCGCCTCCCAGCCTCTG |
| | | TCCCTGCGTCCGGAGGCATGTAGACCCGCAGCTGGTGGGGCCG |
| | | TGCATACCCGGGGTCTTGACTTCGCCTGCGATATCTACATTTGG |
| | | GCCCCTCTGGCTGGTACTTGCGGGGTCCTGCTGCTTTCACTCGT |
| | | GATCACTCTTTACTGTAAGCGCGGTCGGAAGAAGCTGCTGTAC |
| | | ATCTTTAAGCAACCCTTCATGAGGCCTGTGCAGACTACTCAAG |
| | | AGGAGGACGGCTGTTCATGCCGGTTCCCAGAGGAGGAGGAAG |
| | | GCGGCTGCGAACTGCGCGTGAAATTCAGCCGCAGCGCAGATGC |
| | | TCCAGCCTACCAGCAGGGGCAGAACCAGCTCTACAACGAACTC |
| | | AATCTTGGTCGGAGAGAGGAGTACGACGTGCTGGACAAGCGG |
| | | AGAGGACGGGACCCAGAAATGGGCGGGAAGCCGCGCAGAAA |
| | | GAATCCCCAAGAGGGCCTGTACAACGAGCTCCAAAAGGATAA |
| | | GATGGCAGAAGCCTATAGCGAGATTGGTATGAAAGGGGAACG |
| | | CAGAAGAGGCAAAGGCCACGACGGACTGTACCAGGGACTCAG |
| | | CACCGCCACCAAGGACACCTATGACGCTCTTCACATGCAGGCC |
| | | CTGCCGCCTCGG |
| Hy52 | | |
| SEQ ID | HCDR1 | SFRMN |
| NO: 160 | (Kabat) | |
| SEQ ID | HCDR2 | SISSSSSYIYYADSVKG |
| NO: 161 | (Kabat) | |
| SEQ ID | HCDR3 | WLSYYGMDV |
| NO: 162 | (Kabat) | |
| SEQ ID | HCDR1 | GFTFSSF |
| NO: 163 | (Chothia) | |
| SEQ ID | HCDR2 | SSSSSY |
| NO: 164 | (Chothia) | |
| SEQ ID | HCDR3 | WLSYYGMDV |
| NO: 162 | (Chothia) | |
| SEQ ID | HCDR1 | GFTFSSFR |
| NO: 165 | (IMGT) | |
| SEQ ID | HCDR2 | ISSSSSYI |
| NO: 166 | (IMGT) | |
| SEQ ID | HCDR3 | ARWLSYYGMDV |
| NO: 167 | (IMGT) | |
| SEQ ID | VH | EVQLVESGGGLVKPGGSLRLSCAASGFTFSSFRMNWVRQAPGKG |
| NO: 168 | | LEWVSSISSSSSYIYYADSVKGRFTISRDNAKNSLYLQMNSLRAED |
| | | TAVYYCARWLSYYGMDVWGQGTTVTVSS |
| SEQ ID | DNA VH | GAAGTGCAACTGGTGGAGAGCGGTGGAGGGCTTGTCAAGCCC |
| NO: 169 | | GGAGGATCGCTGCGGCTGTCCTGTGCTGCGTCCGGGTTCACCT |
| | | TCTCCTCGTTCCGCATGAACTGGGTCAGACAGGCACCGGGAAA |
| | | GGGCCTCGAATGGGTGTCCTCAATCTCATCGTCCTCGTCCTACA |
| | | TCTACTACGCCGACTCCGTGAAAGGCCGCTTCACCATCTCCCG |
| | | GGACAACGCCAAGAACTCGCTGTACCTCCAAATGAATAGCCTC |
| | | AGGGCGGAAGATACTGCTGTGTATTACTGCGCACGCTGGCTTT |
| | | CCTACTACGGCATGGACGTCTGGGGCCAAGGGACCACTGTGAC |
| | | CGTGTCTAGC |
| SEQ ID | LCDR1 | RSSQSLLDSDDGNTYLD |
| NO: 147 | (Kabat) | |
| SEQ ID | LCDR2 | TLSFRAS |
| NO: 170 | (Kabat) | |
| SEQ ID | LCDR3 | MQRIGFPIT |
| NO: 171 | (Kabat) | |
| SEQ ID | LCDR1 | SQSLLDSDDGNTY |
| NO: 150 | (Chothia) | |
| SEQ ID | LCDR2 | TLS |
| NO: 151 | (Chothia) | |
| SEQ ID | LCDR3 | RIGFPI |
| NO: 172 | (Chothia) | |
| SEQ ID | LCDR1 | QSLLDSDDGNTY |
| NO: 153 | (IMGT) | |
| SEQ ID | LCDR2 | TLS |
| NO: 151 | (IMGT) | |
| SEQ ID | LCDR3 | MQRIGFPIT |
| NO: 171 | (IMGT) | |
| SEQ ID | VL | DIVMTQTPLSLPVTPGEPASISCRSSQSLLDSDDGNTYLDWYLQKP |
| NO: 173 | | GQSPQLLIYTLSFRASGVPDRFSGSGSGTDFTLKIRRVEAEDVGVY |
| | | YCMQRIGFPITFGQGTRLEIK |
| SEQ ID | DNA VL | GATATCGTGATGACCCAGACTCCCCTGTCCCTGCCTGTGACTCC |
| NO: 174 | | CGGAGAACCAGCCTCCATTTCCTGCCGGTCCTCCCAGTCCCTGC |
| | | TGGACAGCGACGACGGCAACACTTACCTGGACTGGTACTTGCA |
| | | GAAGCCGGGCCAATCGCCTCAGCTGCTGATCTATACCCTGTCA |
| | | TTCCGGGCCTCAGGAGTGCCTGACCGCTTCTCGGGATCAGGGA |
| | | GCGGGACCGATTTCACCCTGAAAATTAGGCGAGTGGAAGCCG |
| | | AGGACGTCGGAGTGTACTACTGCATGCAGCGCATCGGCTTCCC |
| | | GATTACGTTTGGACAGGGTACCCGGCTTGAGATCAAG |
| SEQ ID | Linker | GGGGSGGGGSGGGGSGGGGS |
| NO: 63 | | |
| SEQ ID | scFv (VH- | EVQLVESGGGLVKPGGSLRLSCAASGFTFSSFRMNWVRQAPGKG |
| NO: 175 | linker-VL) | LEWVSSISSSSSYIYYADSVKGRFTISRDNAKNSLYLQMNSLRAED |
| | | TAVYYCARWLSYYGMDVWGQGTTVTVSSGGGGSGGGGSGGGG |
| | | SGGGGSDIVMTQTPLSLPVTPGEPASISCRSSQSLLDSDDGNTYLD |
| | | WYLQKPGQSPQLLIYTLSFRASGVPDRFSGSGSGTDFTLKIRRVEA |
| | | EDVGVYYCMQRIGFPITFGQGTRLEIK |
| SEQ ID | DNA scFv | GAAGTGCAACTGGTGGAGAGCGGTGGAGGGCTTGTCAAGCCC |
| NO: 176 | | GGAGGATCGCTGCGGCTGTCCTGTGCTGCGTCCGGGTTCACCT |
| | | TCTCCTCGTTCCGCATGAACTGGGTCAGACAGGCACCGGGAAA |
| | | GGGCCTCGAATGGGTGTCCTCAATCTCATCGTCCTCGTCCTACA |
| | | TCTACTACGCCGACTCCGTGAAAGGCCGCTTCACCATCTCCCG |
| | | GGACAACGCCAAGAACTCGCTGTACCTCCAAATGAATAGCCTC |
| | | AGGGCGGAAGATACTGCTGTGTATTACTGCGCACGCTGGCTTT |
| | | CCTACTACGGCATGGACGTCTGGGGCCAAGGGACCACTGTGAC |
| | | CGTGTCTAGCGGAGGCGGAGGTTCAGGGGGCGGTGGATCAGG |
| | | CGGAGGAGGATCGGGGGGTGGTGGATCGGATATCGTGATGAC |
| | | CCAGACTCCCCTGTCCCTGCCTGTGACTCCCGGAGAACCAGCC |
| | | TCCATTTCCTGCCGGTCCTCCCAGTCCCTGCTGGACAGCGACGA |
| | | CGGCAACACTTACCTGGACTGGTACTTGCAGAAGCCGGGCCAA |
| | | TCGCCTCAGCTGCTGATCTATACCCTGTCATTCCGGGCCTCAGG |
| | | AGTGCCTGACCGCTTCTCGGGATCAGGGAGCGGGACCGATTTC |
| | | ACCCTGAAAATTAGGCGAGTGGAAGCCGAGGACGTCGGAGTG |
| | | TACTACTGCATGCAGCGCATCGGCTTCCCGATTACGTTTGGAC |
| | | AGGGTACCCGGCTTGAGATCAAG |
| SEQ ID | Full CAR | EVQLVESGGGLVKPGGSLRLSCAASGFTFSSFRMNWVRQAPGKG |
| NO: 177 | amino acid | LEWVSSISSSSSYIYYADSVKGRFTISRDNAKNSLYLQMNSLRAED |
| | sequence | TAVYYCARWLSYYGMDVWGQGTTVTVSSGGGGSGGGGSGGGG |
| | | SGGGGSDIVMTQTPLSLPVTPGEPASISCRSSQSLLDSDDGNTYLD |
| | | WYLQKPGQSPQLLIYTLSFRASGVPDRFSGSGSGTDFTLKIRRVEA |
| | | EDVGVYYCMQRIGFPITFGQGTRLEIKTTTPAPRPPTPAPTIASQPL |
| | | SLRPEACRPAAGGAVHTRGLDFACDIYIWAPLAGTCGVLLLSLVI |
| | | TLYCKRGRKKLLYIFKQPFMRPVQTTQEEDGCSCRFPEEEEGGCE |
| | | LRVKFSRSADAPAYQQGQNQLYNELNLGRREEYDVLDKRRGRDP |
| | | EMGGKPRRKNPQEGLYNELQKDKMAEAYSEIGMKGERRRGKGH |
| | | DGLYQGLSTATKDTYDALHMQALPPR |
| SEQ ID | Full CAR | GAAGTGCAACTGGTGGAGAGCGGTGGAGGGCTTGTCAAGCCC |
| NO: 178 | DNA | GGAGGATCGCTGCGGCTGTCCTGTGCTGCGTCCGGGTTCACCT |
| | sequence | TCTCCTCGTTCCGCATGAACTGGGTCAGACAGGCACCGGGAAA |
| | | GGGCCTCGAATGGGTGTCCTCAATCTCATCGTCCTCGTCCTACA |
| | | TCTACTACGCCGACTCCGTGAAAGGCCGCTTCACCATCTCCCG |
| | | GGACAACGCCAAGAACTCGCTGTACCTCCAAATGAATAGCCTC |
| | | AGGGCGGAAGATACTGCTGTGTATTACTGCGCACGCTGGCTTT |
| | | CCTACTACGGCATGGACGTCTGGGGCCAAGGGACCACTGTGAC |
| | | CGTGTCTAGCGGAGGCGGAGGTTCAGGGGGCGGTGGATCAGG |
| | | CGGAGGAGGATCGGGGGGTGGTGGATCGGATATCGTGATGAC |
| | | CCAGACTCCCCTGTCCCTGCCTGTGACTCCCGGAGAACCAGCC |
| | | TCCATTTCCTGCCGGTCCTCCCAGTCCCTGCTGGACAGCGACGA |
| | | CGGCAACACTTACCTGGACTGGTACTTGCAGAAGCCGGGCCAA |
| | | TCGCCTCAGCTGCTGATCTATACCCTGTCATTCCGGGCCTCAGG |
| | | AGTGCCTGACCGCTTCTCGGGATCAGGGAGCGGGACCGATTTC |
| | | ACCCTGAAAATTAGGCGAGTGGAAGCCGAGGACGTCGGAGTG |
| | | TACTACTGCATGCAGCGCATCGGCTTCCCGATTACGTTTGGAC |
| | | AGGGTACCCGGCTTGAGATCAAGACCACTACCCCAGCACCGAG |
| | | GCCACCCACCCCGGCTCCTACCATCGCCTCCCAGCCTCTGTCCC |
| | | TGCGTCCGGAGGCATGTAGACCCGCAGCTGGTGGGGCCGTGCA |
| | | TACCCGGGGTCTTGACTTCGCCTGCGATATCTACATTTGGGCCC |
| | | CTCTGGCTGGTACTTGCGGGGTCCTGCTGCTTTCACTCGTGATC |
| | | ACTCTTTACTGTAAGCGCGGTCGGAAGAAGCTGCTGTACATCT |
| | | TTAAGCAACCCTTCATGAGGCCTGTGCAGACTACTCAAGAGGA |
| | | GGACGGCTGTTCATGCCGGTTCCCAGAGGAGGAGGAAGGCGG |
| | | CTGCGAACTGCGCGTGAAATTCAGCCGCAGCGCAGATGCTCCA |
| | | GCCTACCAGCAGGGGCAGAACCAGCTCTACAACGAACTCAATC |
| | | TTGGTCGGAGAGAGGAGTACGACGTGCTGGACAAGCGGAGAG |
| | | GACGGGACCCAGAAATGGGCGGGAAGCCGCGCAGAAAGAATC |
| | | CCCAAGAGGGCCTGTACAACGAGCTCCAAAAGGATAAGATGG |
| | | CAGAAGCCTATAGCGAGATTGGTATGAAAGGGGAACGCAGAA |
| | | GAGGCAAAGGCCACGACGGACTGTACCAGGGACTCAGCACCG |
| | | CCACCAAGGACACCTATGACGCTCTTCACATGCAGGCCCTGCC |
| | | GCCTCGG |

TABLE 11
Kabat CDRs of exemplary hybridoma-derived anti-BCMA molecules

| Kabat | HCDR1 | HCDR2 | HCDR3 | LCDR1 | LCDR2 | LCDR3 |
|---|---|---|---|---|---|---|
| Hy03 | GFWMS | NIKQDGSE | ALDYYGMD | RSSQSLLDS | TLSYRA | TQRLEFPS |
| | (SEQ ID | KYYVDSVR | V (SEQ ID | DDGNTYLD | S (SEQ ID | IT (SEQ ID |
| | NO: 137) | G (SEQ ID | NO: 139) | (SEQ ID NO: | NO: 148) | NO: 149) |
| | | NO: 138) | | 147) | | |
| Hy52 | SFRMN | SISSSSSYIY | WLSYYGMD | RSSQSLLDS | TLSFRAS | MQRIGFPI |
| | (SEQ ID | YADSVKG | V (SEQ ID | DDGNTYLD | (SEQ ID | T (SEQ ID |
| | NO: 160) | (SEQ ID NO: | NO: 162) | (SEQ ID NO: | NO: 170) | NO: 171) |
| | | 161) | | 147) | | |
| Con- | X₁FX₂MX₃, | X₁IX₂X₃X₄X₅ | X₁LX₂YYGM | RSSQSLLDS | TLSXRAS, | X₁QRX₂X₃F |
| sensus | wherein | SX₆X₇YYX₈ | DV, wherein | DDGNTYLD | wherein | PX₄IT, |
| | X₁ is G or | DSVX₉G, | X₁ is A or W; | (SEQ ID NO: | X is Y or | wherein X₁ |
| | S; X₂ is W | wherein X₁ is | and X₂ is D | 147) | F (SEQ ID | is T or M; |
| | or R; and | Nor S; X₂ is | or S (SEQ ID | | NO: 182) | X₂ is L or I; |
| | X₃ is S or | K or S; X₃ is | NO: 181) | | | X₃ is E or G; |
| | N (SEQ | Q or S; X₄ is | | | | and X₄ is S |
| | ID NO: | D or S; X₅ is | | | | or absent |
| | 179) | G or S; X₆ is | | | | (SEQ ID |
| | | E or Y; X₇ is | | | | NO: 183) |
| | | K or I; X₈ is | | | | |
| | | V or A; and | | | | |
| | | X₉ is R or K | | | | |
| | | (SEQ ID NO: | | | | |
| | | 180) | | | | |

TABLE 12
Chothia CDRs of exemplary hybridoma-derived anti-BCMA molecules

| Chothia | HCDR1 | HCDR2 | HCDR3 | LCDR1 | LCDR2 | LCDR3 |
|---|---|---|---|---|---|---|
| Hy03 | GFTFSGF | KQDGSE | ALDYYGMD | SQSLLDSDD | TLS | RLEFPSI |
| | (SEQ ID | (SEQ ID NO: | V (SEQ ID | GNTY (SEQ | (SEQ ID | (SEQ ID |
| | NO: 140) | 141) | NO: 139) | ID NO: 150) | NO: 151) | NO: 152) |
| Hy52 | GFTFSSF | SSSSSY | WLSYYGMD | SQSLLDSDD | TLS | RIGFPI |
| | (SEQ ID | (SEQ ID NO: | V (SEQ ID | GNTY (SEQ | (SEQ ID | (SEQ ID |
| | NO: 163) | 164) | NO: 162) | ID NO: 150) | NO: 151) | NO: 172) |
| Con- | GFTFSXF, | X₁X₂X₃X₄SX₅, | X₁LX₂YYGM | SQSLLDSDD | TLS | RX₁X₂FPX₃I, |
| sensus | wherein X is | wherein X₁ | DV, wherein | GNTY (SEQ | (SEQ ID | wherein |
| | G or S (SEQ | is K or S; X₂ | X₁ is A or W; | ID NO: 150) | NO: 151) | X₁ is L or |
| | ID NO: 184) | is Q or S; X₃ | and X₂ is D | | | I; X₂ is E |
| | | is D or S; X₄ | or S (SEQ ID | | | or G; and |
| | | is G or S; and | NO: 181) | | | X₃ is S or |
| | | X₅ is E or Y | | | | absent |
| | | (SEQ ID NO: | | | | (SEQ ID |
| | | 185) | | | | NO: 186) |

TABLE 13
IMGT CDRs of exemplary hybridoma-derived anti-BCMA molecules

| IMGT | HCDR1 | HCDR2 | HCDR3 | LCDR1 | LCDR2 | LCDR3 |
|---|---|---|---|---|---|---|
| Hy03 | GFTFSGF | IKQDGSEK | ARALDYYG | QSLLDSDD | TLS (SEQ | TQRLEF |
| | W (SEQ ID | (SEQ ID NO: | MDV (SEQ ID | GNTY (SEQ | ID NO: | PSIT |
| | NO: 142) | 143) | NO: 144) | ID NO: 153) | 151) | (SEQ ID |
| | | | | | | NO: 149) |
| Hy52 | GFTFSSFR | ISSSSSYI | ARWLSYYG | QSLLDSDD | TLS (SEQ | MQRIGF |
| | (SEQ ID | (SEQ ID NO: | MDV (SEQ ID | GNTY (SEQ | ID NO: | PIT |
| | NO: 165) | 166) | NO: 167) | ID NO: 153) | 151) | (SEQ ID |
| | | | | | | NO: 171) |
| Con- | GFTFSX₁F | IX₁X₂X₃X₄S | ARX₁LX₂YYG | QSLLDSDD | TLS (SEQ | X₁QRX₂ |
| sensus | X₂, wherein | X₅X₆, | MDV, wherein | GNTY (SEQ | ID NO: | X₃FPX₄IT, |
| | X₁ is G or S; | wherein X₁ is | X₁ is A or W; | ID NO: 153) | 151) | wherein |
| | and X₂ is W | K or S; X₂ is | and X₂ is D or | | | X₁ is Tor |
| | or R (SEQ | Q or S; X₃ is | S (SEQ ID NO: | | | M; X₂ is |
| | ID NO: 187) | D or S; X₄ is | 189) | | | L or I; X₃ |
| | | G or S; X₅ is | | | | is E or G; |
| | | E or Y; and | | | | and X₄ is |
| | | X₆ is K or I | | | | S or |
| | | (SEQ ID NO: | | | | absent |
| | | 188) | | | | (SEQ ID |
| | | | | | | NO: 183) |

[0341] In some embodiments, BCMA CARs may be generated using the VH and VL sequences from WO2012/0163805 (the contents of which are hereby incorporated by reference in its entirety). In some embodiments, BCMA CARs may be generated using the CDRs, VHs, VLs, scFvs, or full-CAR sequences from WO2019/241426 (the contents of which are hereby incorporated by reference in its entirety).

### Exemplary BCMA CAR D

[0342] In some embodiments, the BCMA CAR comprises a murine extracellular single-chain variable fragment (scFv) specific for recognizing B cell maturation antigen (BCMA) followed by a human CD8α hinge and transmembrane domain fused to the T cell cytoplasmic signaling domains of CD137 (4-1BB) and CD3ζ chain, in tandem. Binding of BCMA CARD to BCMA-expressing target cells leads to signaling initiated by CD3ζ and 4-1BB domains, and subsequent CAR-positive T cell activation. Antigen-specific activation of BCMA CAR D results in CAR-positive T cell proliferation, cytokine secretion, and subsequent cytolytic killing of BCMA-expressing cells. In some embodiments, the BCMA CAR is encoded by a nucleotide sequence of Table 28, or a nucleotide sequence having at least 80%, 85%, 90%, 95%, 97%, or 100% or no more than 20, 15, 10, 8, 5, 4, 3, 2, or 1 variations thereto. In some embodiments, the BCMA CAR comprises a polypeptide encoded by a nucleotide sequence of Table 28, or a nucleotide sequence having at least 80%, 85%, 90%, 95%, 97%, or 100% or no more than 20, 15, 10, 8, 5, 4, 3, 2, or 1 variations thereto. In some embodiments, the BCMA CAR comprises a polypeptide sequence of Table 28, or a polypeptide sequence having at least 80%, 85%, 90%, 95%, 97%, or 100% or no more than 20, 15, 10, 8, 5, 4, 3, 2, or 1 variations thereto. In some embodiments, the BCMA CAR comprises a heavy chain CDR1-3 and a light chain CDR1-3, of a sequence of Table 28. In some embodiments, the BCMA CAR comprises a heavy chain CDR1-3 and a light chain CDR1-3, of a sequence of Table 28 according to Kabat. In some embodiments, the BCMA CAR comprises a heavy chain CDR1-3 and a light chain CDR1-3, of a sequence of Table 28 according to Chothia. In some embodiments, the BCMA CAR comprises a heavy chain CDR1-3 of a sequence of Table 28. In some embodiments, the BCMA CAR comprises a heavy chain CDR1-3 of a sequence of Table 28 according to Kabat. In some embodiments, the BCMA CAR comprises a heavy chain CDR1-3, of a sequence of Table 28 according to Chothia. In some embodiments, the BCMA CAR comprises a light chain CDR1-3 of a sequence of Table 28. In some embodiments, the BCMA CAR comprises a light chain CDR1-3 of a sequence of Table 28 according to Kabat. In some embodiments, the BCMA CAR comprises a light chain CDR1-3 of a sequence of Table 28 according to Chothia.

TABLE 28
Amino acid sequence of an exemplary BCMA CAR

| SEQ ID | | |
|---|---|---|
| NO: | Description | Sequence |
| 375 | Exemplary | MALPVTALLLPLALLLHAARPDIVLTQSPPSLAMSLGKRATISCRA |
| | BCMA | SESVTILGSHLIHWYQQKPGQPPTLLIQLASNVQTGVPARFSGSGS |
| | CAR D | RTDFTLTIDPVEEDDVAVYYCLQSRTIPRTFGGGTKLEIKGSTSGS |
| | Protein | GKPGSGEGSTKGQIQLVQSGPELKKPGETVKISCKASGYTFTDYSI |
| | Sequence | NWVKRAPGKGLKWMGWINTETREPAYAYDFRGRFAFSLETSASTAY |
| | | LQINNLKYEDTATYFCALDYSYAMDYWGQGTSVTVSSAAATTTPAP |
| | | RPPTPAPTIASQPLSLRPEACRPAAGGAVHTRGLDFACDIYIWAPL |
| | | AGTCGVLLLSLVITLYCKRGRKKLLYIFKQPFMRPVQTTQEEDGCS |
| | | CRFPEEEEGGCELRVKFSRSADAPAYQQGQNQLYNELNLGRREEYD |
| | | VLDKRRGRDPEMGGKPRRKNPQEGLYNELQKDKMAEAYSEIGMKGE |
| | | RRRGKGHDGLYQGLSTATKDTYDALHMQALPPR |
| 376 | Exemplary | atggcactcc ccgtcaccgc ccttctcttg |
| | BCMA | cccctcgccc tgctgctgca tgctgccaggcccgacattg |
| | CAR D | tgctcactca gtcacctccc agcctggcca |
| | nucleotide | tgagcctggg aaaaagggccaccatctcct gtagagccag |
| | Sequence | tgagtccgtc acaatcttgg ggagccatct |
| | | tattcactggtatcagcaga agcccgggca gcctccaacc |
| | | cttcttattc agctcgcgtc aaacgtccagacgggtgtac |
| | | ctgccagatt ttctggtagc gggtcccgca |
| | | ctgattttac actgaccatagatccagtgg aagaagacga |
| | | tgtggccgtg tattattgtc tgcagagcag |
| | | aacgattcctcgcacatttg gtgggggtac taagctggag |
| | | attaagggaa gcacgtccgg ctcagggaagccgggctccg |
| | | gcgagggaag cacgaagggg caaattcagc |
| | | tggtccagag cggacctgagctgaaaaaac ccggcgagac |
| | | tgttaagatc agttgtaaag catctggcta |
| | | taccttcaccgactacagca taaattgggt gaaacgggcc |
| | | cctggaaagg gcctcaaatg gatgggttggatcaataccg |
| | | aaactaggga gcctgcttat gcatatgact |
| | | tccgcgggag attcgccttttcactcgaga catctgcctc |
| | | tactgcttac ctccaaataa acaacctcaa |
| | | gtatgaagatacagccactt acttttgcgc cctcgactat |
| | | agttacgcca tggactactg gggacagggaacctccgtta |
| | | ccgtcagttc cgcggccgca accacaacac |
| | | ctgctccaag gccccccacacccgctccaa ctatagccag |
| | | ccaaccattg agcctcagac ctgaagcttg |
| | | caggcccgcagcaggaggcg ccgtccatac gcgaggcctg |
| | | gacttcgcgt gtgatattta tatttgggcccctttggccg |
| | | gaacatgtgg ggtgttgctt ctctcccttg |
| | | tgatcactct gtattgtaagcgcgggagaa agaagctcct |
| | | gtacatcttc aagcagcctt ttatgcgacc |
| | | tgtgcaaaccactcaggaag aagatgggtg ttcatgccgc |
| | | ttccccgagg aggaagaagg agggtgtgaactgagggtga |
| | | aattttctag aagcgccgat gctcccgcat |
| | | atcagcaggg tcagaatcagctctacaatg aattgaatct |
| | | cggcaggcga gaagagtacg atgttctgga |
| | | caagagacggggcagggatc ccgagatggg gggaaagccc |
| | | cggagaaaaa atcctcagga ggggttgtacaatgagctgc |
| | | agaaggacaa gatggctgaa gcctatagcg |
| | | agatcggaat gaaaggcgaaagacgcagag gcaaggggca |
| | | tgacggtctg taccagggtc tctctacagc |
| | | caccaaggacacttatgatg cgttgcatat gcaagccttg |
| | | ccaccccgct aatga |

### Exemplary BCMA CAR E

[0343] In some embodiments, the BCMA CAR comprises two single-domain antibodies linked to a 4-1BB costimulatory domain and a CD3-zeta signaling domain. In some embodiments, the chimeric antigen receptor described herein comprises a polypeptide comprising, (a) an extracellular antigen binding domain comprising a first anti-BCMA single domain antibody (sdAb), and a second anti-BCMA sdAb. In some embodiments, each of the first and second anti-BCMA antibody are independently a VhH domain. In certain embodiments, the first anti-BCMA sdAb comprises a CDR1, a CDR2, and a CDR3 as set forth in the VhH domain comprising the amino acid sequence of SEQ ID NO: 377, or a peptide sequence having at least 80%, 85%, 90%, 95%, 97%, or 100% or no more than 20, 15, 10, 8, 5, 4, 3, 2, or 1 variations thereto. In certain embodiments, the second anti-BCMA sdAb comprises a CDR1, a CDR2, and a CDR3 as set forth in the VhH domain comprising the amino acid sequence of SEQ ID NO: 381, or a peptide sequence having at least 80%, 85%, 90%, 95%, 97%, or 100% or no more than 20, 15, 10, 8, 5, 4, 3, 2, or 1 variations thereto. In certain embodiments, the BCMA CAR is any BCMA CAR described in U.S. Pat. No. 11,186,647, the entire contents of which are incorporated herein by reference. In some embodiments, the CD19 CAR is encoded by a nucleotide sequence of Table 29, or a nucleotide sequence having at least 80%, 85%, 90%, 95%, 97%, or 100% or no more than 20, 15, 10, 8, 5, 4, 3, 2, or 1 variations thereto. In some embodiments, the CD19 CAR comprises a polypeptide encoded by a nucleotide sequence of Table 29, or a nucleotide sequence having at least 80%, 85%, 90%, 95%, 97%, or 100% or no more than 20, 15, 10, 8, 5, 4, 3, 2, or 1 variations thereto. In some embodiments, the CD19 CAR comprises a polypeptide sequence of Table 29, or a polypeptide sequence having at least 80%, 85%, 90%, 95%, 97%, or 100% or no more than 20, 15, 10, 8, 5, 4, 3, 2, or 1 variations thereto. In some embodiments, the BCMA CAR comprises a heavy chain CDR1-3 and a light chain CDR1-3, of a sequence of Table 29. In some embodiments, the BCMA CAR comprises a heavy chain CDR1-3 and a light chain CDR1-3, of a sequence of Table 29 according to Kabat. In some embodiments, the BCMA CAR comprises a heavy chain CDR1-3 and a light chain CDR1-3, of a sequence of Table 29 according to Chothia. In some embodiments, the BCMA CAR comprises a heavy chain CDR1-3 of a sequence of Table 29. In some embodiments, the BCMA CAR comprises a heavy chain CDR1-3 of a sequence of Table 29 according to Kabat. In some embodiments, the BCMA CAR comprises a heavy chain CDR1-3 of a sequence of Table 29 according to Chothia. In some embodiments, the BCMA CAR comprises a light chain CDR1-3 of a sequence of Table 29. In some embodiments, the BCMA CAR comprises a light chain CDR1-3 of a sequence of Table 29 according to Kabat. In some embodiments, the BCMA CAR comprises a light chain CDR1-3 of a sequence of Table 29 according to Chothia.

TABLE 29
Amino acid and nucleic acid sequences of an exemplary BCMA CAR D

| SEQ ID | | |
|---|---|---|
| NO: | Description | Sequence |
| 377 | Antigen | QVKLEESGGGLVQAGRSLRLSCAASEHTFSSHVMGWFRQAPGKERE |
| | Binding | SVAVIGWRDISTSYADSVKGRFTISRDNAKKTLYLQMNSLKPEDTA |
| | Domain | VYYCAARRIDAADFDSWGQGTQVTVSS |
| | VhH One | |
| 378 | Antigen | SHVMG |
| | Binding | |
| | Domain | |
| | VhH One | |
| | CDR1 | |
| 379 | Antigen | VIGWRDISTSYADSVK |
| | Binding | |
| | Domain | |
| | VhH One | |
| | CDR2 | |
| 380 | Antigen | ARRIDAADFDS |
| | Binding | |
| | Domain | |
| | VhH One | |
| | CDR3 | |
| 381 | Antigen | EVQLVESGGGLVQAGGSLRLSCAASGRTFTMGWFRQAPGKEREFVA |
| | Binding | AISLSPTLAYYAESVKGRFTISRDNAKNTVVLQMNSLKPEDTALYY |
| | Domain | CAADRKSVMSIRPDYWGQGTQVTVSS |
| | VhH Two | |
| 382 | Antigen | TFTMG |
| | Binding | |
| | Domain | |
| | VhH Two | |
| | CDR1 | |
| 383 | Antigen | AISLSPTLAYYAESVK |
| | Binding | |
| | Domain | |
| | VhH Two | |
| | CDR2 | |
| 384 | Antigen | ADRKSVMSIRPDY |
| | Binding | |
| | Domain | |
| | VhH Two | |
| | CDR3 | |
| 385 | Exemplary | CAGGTCAAACTGGAAGAATCTGGCGGAGGCCTGGTGCAGGCAGGAC |
| | BCMA | GGAGCCTGCGCCTGAGCTGCGCAGCATCCGAGCACACCTTCAGCTC |
| | CARD | CCACGTGATGGGCTGGTTTCGGCAGGCCCCAGGCAAGGAGAGAGAG |
| | Nucleic | AGCGTGGCCGTGATCGGCTGGAGGGACATCTCCACATCTTACGCCG |
| | Acid | ATTCCGTGAAGGGCCGGTTCACCATCAGCCGGGACAACGCCAAGAA |
| | | GACACTGTATCTGCAGATGAACAGCCTGAAGCCCGAGGACACCGCC |
| | | GTGTACTATTGCGCAGCAAGGAGAATCGACGCAGCAGACTTTGATT |
| | | CCTGGGGCCAGGGCACCCAGGTGACAGTGTCTAGCGGAGGAGGAGG |
| | | ATCTGAGGTGCAGCTGGTGGAGAGCGGAGGCGGCCTGGTGCAGGCC |
| | | GGAGGCTCTCTGAGGCTGAGCTGTGCAGCATCCGGAAGAACCTTCA |
| | | CAATGGGCTGGTTTAGGCAGGCACCAGGAAAGGAGAGGGAGTTCGT |
| | | GGCAGCAATCAGCCTGTCCCCTACCCTGGCCTACTATGCCGAGAGC |
| | | GTGAAGGGCAGGTTTACCATCTCCCGCGATAACGCCAAGAATACAG |
| | | TGGTGCTGCAGATGAACTCCCTGAAACCTGAGGACACAGCCCTGTA |
| | | CTATTGTGCCGCCGATCGGAAGAGCGTGATGAGCATTAGACCAGAC |
| | | TATTGGGGGCAGGGAACACAGGTGACCGTGAGCAGCACTAGTACCA |
| | | CGACGCCAGCGCCGCGACCACCAACACCGGCGCCCACCATCGCGTC |
| | | GCAGCCCCTGTCCCTGCGCCCAGAGGCGTGCCGGCCAGCGGCGGGG |
| | | GGCGCAGTGCACACGAGGGGGCTGGACTTCGCCTGTGATATCTACA |
| | | TCTGGGCGCCCTTGGCCGGGACTTGTGGGGTCCTTCTCCTGTCACT |
| | | GGTTATCACCCTTTACTGCAAACGGGGCAGAAAGAAACTCCTGTAT |
| | | ATATTCAAACAACCATTTATGAGACCAGTACAAACTACTCAAGAGG |
| | | AAGATGGCTGTAGCTGCCGATTTCCAGAAGAAGAAGAAGGAGGATG |
| | | TGAACTGAGAGTGAAGTTCAGCAGGAGCGCAGACGCCCCCGCGTAC |
| | | CAGCAGGGCCAGAACCAGCTCTATAACGAGCTCAATCTAGGACGAA |
| | | GAGAGGAGTACGATGTTTTGGACAAGAGACGTGGCCGGGACCCTGA |
| | | GATGGGGGGAAAGCCGAGAAGGAAGAACCCTCAGGAAGGCCTGTAC |
| | | AATGAACTGCAGAAAGATAAGATGGCGGAGGCCTACAGTGAGATTG |
| | | GGATGAAAGGCGAGCGCCGGAGGGGCAAGGGGCACGATGGCCTTTA |
| | | CCAGGGTCTCAGTACAGCCACCAAGGACACCTACGACGCCCTTCAC |
| | | ATGCAGGCCCTGCCCCCTCGCTAA |
| 386 | Exemplary | QVKLEESGGGLVQAGRSLRLSCAASEHTFSSHVMGWFRQAPGKERE |
| | BCMA | SVAVIGWRDISTSYADSVKGRFTISRDNAKKTLYLQMNSLKPEDTA |
| | CAR D | VYYCAARRIDAADFDSWGQGTQVTVSSGGGGSEVQLVESGGGLVQA |
| | Peptide | GGSLRLSCAASGRTFTMGWFRQAPGKEREFVAAISLSPTLAYYAES |
| | sequence | VKGRFTISRDNAKNTVVLQMNSLKPEDTALYYCAADRKSVMSIRPD |
| | | YWGQGTQVTVSSTSTTTPAPRPPTPAPTIASQPLSLRPEACRPAAG |
| | | GAVHTRGLDFACDIYIWAPLAGTCGVLLLSLVITLYCKRGRKKLLY |
| | | IFKQPFMRPVQTTQEEDGCSCRFPEEEEGGCELRVKFSRSADAPAY |
| | | QQGQNQLYNELNLGRREEYDVLDKRRGRDPEMGGKPRRKNPQEGLY |
| | | NELQKDKMAEAYSEIGMKGERRRGKGHDGLYQGLSTATKDTYDALH |
| | | MQALPPR |

### Other Exemplary Targets

[0344] Further non-limiting exemplary tumor antigens include CD20, CD22, EGFR, CD123, and CLL-1.

[0345] CARs that bind to CD20 are known in the art. For example, those disclosed in WO2018/067992 or WO2016/164731, incorporated by reference herein, can be used in accordance with the present disclosure. Any known CD20 CAR, for example, the CD20 antigen binding domain of any known CD20 CAR, in the art can be used in accordance with the present disclosure. Exemplary CD20-binding sequences or CD20 CAR sequences are disclosed in, for example, Tables 1-5 of WO2018/067992, incorporated by reference. In some embodiments, the CD20 CAR comprises a CDR, variable region, scFv, or full-length sequence of a CD20 CAR disclosed in WO2018/067992 or WO2016/164731, both incorporated by reference herein. In some embodiments, CD20 CARs comprise a sequence, for example, a CDR, VH, VL, scFv, or full-CAR sequence, disclosed in Table 23 below, or a sequence having at least 70%, 75%, 80%, 85%, 90%, 95%, 96%, 97%, 98%, or 99% identity thereto.

[0346] Exemplary antigen binding domains that bind CD20 are described in WO2016/164731 and WO2018/067992, incorporated herein by reference. In some embodiments, the antigen binding domain of one or more of the CD20 antigen binding domains disclosed therein.

[0347] Exemplary antigen binding domains that bind CD22 are described in WO2016/164731 and WO2018/067992, incorporated herein by reference.

[0348] In some embodiments, the antigen binding domain comprises a HC CDR1, a HC CDR2, and a HC CDR3 of any heavy chain binding domain amino acid sequences listed in Table 15. In embodiments, the antigen binding domain further comprises a LC CDR1, a LC CDR2, and a LC CDR3. In embodiments, the antigen binding domain comprises a LC CDR1, a LC CDR2, and a LC CDR3 amino acid sequences listed in Table 16.

[0349] In some embodiments, the antigen binding domain comprises one, two or all of LC CDR1, LC CDR2, and LC CDR3 of any light chain binding domain amino acid sequences listed in Table 16, and one, two or all of HC CDR1, HC CDR2, and HC CDR3 of any heavy chain binding domain amino acid sequences listed in Table 15.

[0350] Exemplary antigen binding domains that bind EGFRvIII are described in in WO2014/130657.

[0351] Exemplary antigen binding domains that bind CD123 are described in WO 2014/130635 and WO2016/028896, incorporated herein by reference.

[0352] In some embodiments, the antigen binding domain comprises a sequence from Tables 1-2 of WO2014/130635, incorporated herein by reference.

[0353] In some embodiments, the antigen binding domain comprises a sequence from Tables 2, 6, and 9 of WO2016/028896, incorporated herein by reference.

[0354] Exemplary antigen binding domains that bind CLL-1 are disclosed in WO2016/014535, incorporated herein by reference.

[0355] In some embodiments, the antigen binding domain comprises one, two three (for example, all three) heavy chain CDRs, HC CDR1, HC CDR2 and HC CDR3, from an antibody described herein (for example, an antibody described in WO2015/142675, US-2015-0283178-A1, US-2016-0046724-A1, US2014/0322212A1, US2016/0068601A1, US2016/0051651A1, US2016/0096892A1, US2014/0322275A1, or WO2015/090230, incorporated herein by reference), and/or one, two, three (for example, all three) light chain CDRs, LC CDR1, LC CDR2 and LC CDR3, from an antibody described herein (for example, an antibody described in WO2015/142675, US-2015-0283178-A1, US-2016-0046724-A1, US2014/0322212A1, US2016/0068601A1, US2016/0051651A1, US2016/0096892A1, US2014/0322275A1, or WO2015/090230, incorporated herein by reference). In some embodiments, the antigen binding domain comprises a heavy chain variable region and/or a variable light chain region of an antibody listed above.

[0356] In embodiments, the antigen binding domain is an antigen binding domain described in WO2015/142675, US-2015-0283178-A1, US-2016-0046724-A1, US2014/0322212A1, US2016/0068601A1, US2016/0051651A1, US2016/0096892A1, US2014/0322275A1, or WO2015/090230, incorporated herein by reference.

[0357] Exemplary target antigens that can be targeted using the CAR-expressing cells, include, but are not limited to, CD19, CD123, EGFRvIII, CD33, mesothelin, BCMA, and GFR ALPHA-4, among others, as described in, for example, WO2014/153270, WO 2014/130635, WO2016/028896, WO 2014/130657, WO2016/014576, WO 2015/090230, WO2016/014565, WO2016/014535, and WO2016/025880, each of which is herein incorporated by reference in its entirety.

[0358] In some embodiments, the antigen binding domain of any of the CARs described herein (for example, any of CD19, CD123, EGFRvIII, CD33, mesothelin, BCMA, and GFR ALPHA-4) comprises one, two three (for example, all three) heavy chain CDRs, HC CDR1, HC CDR2 and HC CDR3, from an antibody listed above, and/or one, two, three (for example, all three) light chain CDRs, LC CDR1, LC CDR2 and LC CDR3, from an antigen binding domain listed above. In some embodiments, the antigen binding domain comprises a heavy chain variable region and/or a variable light chain region of an antibody listed or described above.

[0359] In some embodiments, the antigen binding domain comprises one, two three (for example, all three) heavy chain CDRs, HC CDR1, HC CDR2 and HC CDR3, from an antibody listed above, and/or one, two, three (for example, all three) light chain CDRs, LC CDR1, LC CDR2 and LC CDR3, from an antibody listed above. In some embodiments, the antigen binding domain comprises a heavy chain variable region and/or a variable light chain region of an antibody listed or described above.

TABLE 23
Amino acid sequences of exemplary anti-CD20 molecules

| SEQ ID NO: | Region | Sequence |
|---|---|---|
| CD20-C3H2 | | |
| 769 | HCDR1 | NYNLH |
| | (Kabat) | |
| 770 | HCDR2 | AIYPGNYDTSYNQKFKG |
| | (Kabat) | |
| 771 | HCDR3 | VDFGHSRYWYFDV |
| | (Kabat) | |
| 772 | HCDR1 | GYTFTNY |
| | (Chothia) | |
| 773 | HCDR2 | YPGNYD |
| | (Chothia) | |
| 771 | HCDR3 | VDFGHSRYWYFDV |
| | (Chothia) | |
| 774 | HCDR1 | GYTFTNYN |
| | (IMGT) | |
| 775 | HCDR2 | IYPGNYDT |
| | (IMGT) | |
| 776 | HCDR3 | ARVDFGHSRYWYFDV |
| | (IMGT) | |
| 777 | HCDR1 | GYTFTNYNLH |
| | (Combined) | |
| 770 | HCDR2 | AIYPGNYDTSYNQKFKG |
| | (Combined) | |
| 771 | HCDR3 | VDFGHSRYWYFDV |
| | (Combined) | |
| 778 | VH | QVQLVQSGAEVKKPGASVKVSCKASGYTFTNYNLHWVRQ |
| | | APGQGLEWMGAIYPGNYDTSYNQKFKGRVTMTADKSTSTA |
| | | YMELSSLRSEDTAVYYCARVDFGHSRYWYFDVWGQGTTV |
| | | TVSS |
| 779 | DNA VH | CAAGTCCAACTCGTCCAGTCCGGTGCAGAAGTCAAGAAA |
| | | CCTGGAGCATCCGTGAAAGTGTCTTGCAAAGCCTCCGGCT |
| | | ACACCTTCACCAACTACAACCTCCATTGGGTCAGACAGG |
| | | CCCCCGGACAAGGACTCGAATGGATGGGAGCGATCTACC |
| | | CGGGAAACTACGACACCAGCTACAACCAGAAGTTCAAGG |
| | | GCCGCGTGACTATGACCGCCGATAAGAGCACCTCCACCG |
| | | CCTACATGGAACTGTCCTCGCTGAGGTCCGAGGACACTG |
| | | CGGTGTACTACTGCGCCCGCGTGGACTTCGGACACTCACG |
| | | GTATTGGTACTTCGACGTCTGGGGACAGGGCACTACCGT |
| | | GACCGTGTCGAGC |
| 780 | LCDR1 | RATSSVSSMN |
| | (Kabat) | |
| 781 | LCDR2 | ATSNLAS |
| | (Kabat) | |
| 782 | LCDR3 | QQWTFNPPT |
| | (Kabat) | |
| 783 | LCDR1 | TSSVSS |
| | (Chothia) | |
| 784 | LCDR2 | ATS |
| | (Chothia) | |
| 785 | LCDR3 | WTFNPP |
| | (Chothia) | |
| 786 | LCDR1 | SSVSS |
| | (IMGT) | |
| 784 | LCDR2 | ATS |
| | (IMGT) | |
| 782 | LCDR3 | QQWTFNPPT |
| | (IMGT) | |
| 780 | LCDR1 | RATSSVSSMN |
| | (Combined) | |
| 781 | LCDR2 | ATSNLAS |
| | (Combined) | |
| 782 | LCDR3 | QQWTFNPPT |
| | (Combined) | |
| 787 | VL | DIQLTQSPSFLSASVGDRVTITCRATSSVSSMNWYQQKPGK |
| | | APKPLIHATSNLASGVPSRFSGSGSGTEYTLTISSLQPEDFAT |
| | | YYCQQWTFNPPTFGQGTKLEIK |
| 788 | DNA VL | GATATCCAGCTGACTCAGTCCCCGTCATTCCTGTCCGCCT |
| | | CCGTGGGAGACAGAGTGACCATCACCTGTCGGGCCACTT |
| | | CCTCCGTGTCAAGCATGAACTGGTATCAGCAGAAGCCCG |
| | | GGAAGGCCCCAAAGCCGCTGATTCACGCGACGTCCAACC |
| | | TGGCTTCCGGCGTGCCGAGCCGGTTCTCCGGCTCGGGGA |
| | | GCGGGACTGAGTACACCCTGACTATTTCCTCGCTTCAACC |
| | | CGAGGACTTTGCTACCTACTACTGCCAACAGTGGACCTTC |
| | | AATCCTCCGACATTCGGACAGGGTACCAAGTTGGAAATC |
| | | AAG |
| 789 | scFv (VH- | QVQLVQSGAEVKKPGASVKVSCKASGYTFTNYNLHWVRQ |
| | linker-VL) | APGQGLEWMGAIYPGNYDTSYNQKFKGRVTMTADKSTSTA |
| | | YMELSSLRSEDTAVYYCARVDFGHSRYWYFDVWGQGTTV |
| | | TVSSGGGGSGGGGSGGGGSGGGGSDIQLTQSPSFLSASVGD |
| | | RVTITCRATSSVSSMNWYQQKPGKAPKPLIHATSNLASGVP |
| | | SRFSGSGSGTEYTLTISSLQPEDFATYYCQQWTFNPPTFGQG |
| | | TKLEIK |
| 790 | DNA scFv | caagtccaactcgtccagtccggtgcagaagtcaagaaacctggagcatccgtgaaagtgtctt |
| | (VH-linker- | gcaaagcctccggctacaccttcaccaactacaacctccattgggtcagacaggcccccggac |
| | VL | aaggactcgaatggatgggagcgatctacccgggaaactacgacaccagctacaaccagaa |
| | | gttcaagggccgcgtgactatgaccgccgataagagcacctccaccgcctacatggaactgtc |
| | | ctcgctgaggtccgaggacactgcggtgtactactgcgcccgcgtggacttcggacactcacg |
| | | gtattggtacttcgacgtctggggacagggcactaccgtgaccgtgtcgagcggcggaggag |
| | | gttcggggggggcggatcagggggcggcggcagcggtggagggggctcggatatccag |
| | | ctgactcagtccccgtcattcctgtccgcctccgtgggagacagagtgaccatcacctgtcggg |
| | | ccacttcctccgtgtcaagcatgaactggtatcagcagaagcccgggaaggccccaaagccg |
| | | ctgattcacgcgacgtccaacctggcttccggcgtgccgagccggttctccggctcggggagc |
| | | gggactgagtacaccctgactatttcctcgcttcaacccgaggactttgctacctactactgccaa |
| | | cagtggaccttcaatcctccgacattcggacagggtaccaagttggaaatcaag |
| 791 | Full CAR | MALPVTALLLPLALLLHAARPQVQLVQSGAEVKKPGASVK |
| | amino acid | VSCKASGYTFTNYNLHWVRQAPGQGLEWMGAIYPGNYDT |
| | sequence | SYNQKFKGRVTMTADKSTSTAYMELSSLRSEDTAVYYCAR |
| | | VDFGHSRYWYFDVWGQGTTVTVSSGGGGSGGGGSGGGGS |
| | | GGGGSDIQLTQSPSFLSASVGDRVTITCRATSSVSSMNWYQ |
| | | QKPGKAPKPLIHATSNLASGVPSRFSGSGSGTEYTLTISSLQP |
| | | EDFATYYCQQWTFNPPTFGQGTKLEIKTTTPAPRPPTPAPTIA |
| | | SQPLSLRPEACRPAAGGAVHTRGLDFACDIYIWAPLAGTCG |
| | | VLLLSLVITLYCKRGRKKLLYIFKQPFMRPVQTTQEEDGCSC |
| | | RFPEEEEGGCELRVKFSRSADAPAYQQGQNQLYNELNLGRR |
| | | EEYDVLDKRRGRDPEMGGKPRRKNPQEGLYNELQKDKMA |
| | | EAYSEIGMKGERRRGKGHDGLYQGLSTATKDTYDALHMQ |
| | | ALPPR |
| 792 | Full CAR | ATGGCCCTCCCTGTCACCGCCCTGCTGCTTCCGCTGGCTC |
| | nucleotide | TTCTGCTCCACGCCGCTCGGCCCCAAGTCCAACTCGTCCA |
| | sequence | GTCCGGTGCAGAAGTCAAGAAACCTGGAGCATCCGTGAA |
| | | AGTGTCTTGCAAAGCCTCCGGCTACACCTTCACCAACTAC |
| | | AACCTCCATTGGGTCAGACAGGCCCCCGGACAAGGACTC |
| | | GAATGGATGGGAGCGATCTACCCGGGAAACTACGACACC |
| | | AGCTACAACCAGAAGTTCAAGGGCCGCGTGACTATGACC |
| | | GCCGATAAGAGCACCTCCACCGCCTACATGGAACTGTCC |
| | | TCGCTGAGGTCCGAGGACACTGCGGTGTACTACTGCGCC |
| | | CGCGTGGACTTCGGACACTCACGGTATTGGTACTTCGACG |
| | | TCTGGGGACAGGGCACTACCGTGACCGTGTCGAGCGGCG |
| | | GAGGAGGTTCGGGAGGGGGCGGATCAGGGGGCGGCGGC |
| | | AGCGGTGGAGGGGGCTCGGATATCCAGCTGACTCAGTCC |
| | | CCGTCATTCCTGTCCGCCTCCGTGGGAGACAGAGTGACCA |
| | | TCACCTGTCGGGCCACTTCCTCCGTGTCAAGCATGAACTG |
| | | GTATCAGCAGAAGCCCGGGAAGGCCCCAAAGCCGCTGAT |
| | | TCACGCGACGTCCAACCTGGCTTCCGGCGTGCCGAGCCG |
| | | GTTCTCCGGCTCGGGGAGCGGGACTGAGTACACCCTGAC |
| | | TATTTCCTCGCTTCAACCCGAGGACTTTGCTACCTACTAC |
| | | TGCCAACAGTGGACCTTCAATCCTCCGACATTCGGACAG |
| | | GGTACCAAGTTGGAAATCAAGACCACTACCCCAGCACCG |
| | | AGGCCACCCACCCCGGCTCCTACCATCGCCTCCCAGCCTC |
| | | TGTCCCTGCGTCCGGAGGCATGTAGACCCGCAGCTGGTG |
| | | GGGCCGTGCATACCCGGGGTCTTGACTTCGCCTGCGATAT |
| | | CTACATTTGGGCCCCTCTGGCTGGTACTTGCGGGGTCCTG |
| | | CTGCTTTCACTCGTGATCACTCTTTACTGTAAGCGCGGTC |
| | | GGAAGAAGCTGCTGTACATCTTTAAGCAACCCTTCATGA |
| | | GGCCTGTGCAGACTACTCAAGAGGAGGACGGCTGTTCAT |
| | | GCCGGTTCCCAGAGGAGGAGGAAGGCGGCTGCGAACTGC |
| | | GCGTGAAATTCAGCCGCAGCGCAGATGCTCCAGCCTACC |
| | | AGCAGGGGCAGAACCAGCTCTACAACGAACTCAATCTTG |
| | | GTCGGAGAGAGGAGTACGACGTGCTGGACAAGCGGAGA |
| | | GGACGGGACCCAGAAATGGGCGGGAAGCCGCGCAGAAA |
| | | GAATCCCCAAGAGGGCCTGTACAACGAGCTCCAAAAGGA |
| | | TAAGATGGCAGAAGCCTATAGCGAGATTGGTATGAAAGG |
| | | GGAACGCAGAAGAGGCAAAGGCCACGACGGACTGTACC |
| | | AGGGACTCAGCACCGCCACCAAGGACACCTATGACGCTC |
| | | TTCACATGCAGGCCCTGCCGCCTCGG |
| CD20-C5H1 | | |
| 793 | HCDR1 | SYNMH |
| | (Kabat) | |
| 794 | HCDR2 | AIYPGNGDTSYNPKFKG |
| | (Kabat) | |
| 795 | HCDR3 | SYFYGSSSWYFDV |
| | (Kabat) | |
| 523 | HCDR1 | GYTFTSY |
| | (Chothia) | |
| 796 | HCDR2 | YPGNGD |
| | (Chothia) | |
| 795 | HCDR3 | SYFYGSSSWYFDV |
| | (Chothia) | |
| 797 | HCDR1 | GYTFTSYN |
| | (IMGT) | |
| 798 | HCDR2 | IYPGNGDT |
| | (IMGT) | |
| 799 | HCDR3 | ARSYFYGSSSWYFDV |
| | (IMGT) | |
| 800 | HCDR1 | GYTFTSYNMH |
| | (Combined) | |
| 794 | HCDR2 | AIYPGNGDTSYNPKFKG |
| | (Combined) | |
| 795 | HCDR3 | SYFYGSSSWYFDV |
| | (Combined) | |
| 801 | VH | QVQLVQSGAEVKKPGASVKVSCKASGYTFTSYNMHWVRQ |
| | | APGQGLEWMGAIYPGNGDTSYNPKFKGRVTMTADKSTRTA |
| | | YMELSSLRSEDTAVYYCARSYFYGSSSWYFDVWGQGTTVT |
| | | VSS |
| 802 | DNA VH | CAAGTGCAGCTCGTCCAGTCCGGTGCAGAAGTCAAGAAA |
| | | CCCGGTGCTTCAGTGAAAGTGTCCTGCAAGGCCTCCGGTT |
| | | ACACCTTCACCTCCTACAACATGCACTGGGTCCGCCAAGC |
| | | CCCGGGCCAGGGACTCGAATGGATGGGAGCCATCTACCC |
| | | TGGCAACGGGGACACCTCATACAACCCTAAGTTCAAGGG |
| | | CAGAGTGACCATGACTGCGGACAAGTCCACTAGAACAGC |
| | | GTACATGGAGCTGAGCAGCCTGCGGTCCGAGGATACTGC |
| | | CGTGTACTACTGCGCCCGCTCCTACTTCTACGGAAGCTCG |
| | | TCGTGGTACTTCGATGTCTGGGGACAGGGCACCACTGTG |
| | | ACTGTGTCCTCC |
| 803 | LCDR1 | RASSSVSSMH |
| | (Kabat) | |
| 781 | LCDR2 | ATSNLAS |
| | (Kabat) | |
| 804 | LCDR3 | QQWIFNPPT |
| | (Kabat) | |
| 805 | LCDR1 | SSSVSS |
| | (Chothia) | |
| 784 | LCDR2 | ATS |
| | (Chothia) | |
| 806 | LCDR3 | WIFNPP |
| | (Chothia) | |
| 786 | LCDR1 | SSVSS |
| | (IMGT) | |
| 784 | LCDR2 | ATS |
| | (IMGT) | |
| 804 | LCDR3 | QQWIFNPPT |
| | (IMGT) | |
| 803 | LCDR1 | RASSSVSSMH |
| | (Combined) | |
| 781 | LCDR2 | ATSNLAS |
| | (Combined) | |
| 804 | LCDR3 | QQWIFNPPT |
| | (Combined) | |
| 807 | VL | EIVLTQSPATLSLSPGERATLSCRASSSVSSMHWYQQKPGQA |
| | | PRPLIFATSNLASGIPARFSGSGSGTDYTLTISSLEPEDAAVYY |
| | | CQQWIFNPPTFGGGTKVEIK |
| 808 | DNA VL | GAAATTGTGCTGACTCAGAGCCCCGCCACCCTGAGCTTGT |
| | | CCCCCGGGGAAAGGGCAACGCTGTCATGCCGCGCCTCGT |
| | | CATCCGTGTCCTCCATGCATTGGTACCAGCAGAAGCCGG |
| | | GACAGGCCCCTCGGCCGCTGATCTTCGCCACCTCCAATCT |
| | | CGCTTCCGGCATTCCGGCCCGGTTCTCGGGAAGCGGGTCG |
| | | GGGACCGACTATACCCTGACCATCTCTAGCCTTGAACCTG |
| | | AGGACGCCGCGGTGTACTATTGTCAACAGTGGATCTTTAA |
| | | CCCCCCAACCTTCGGTGGAGGCACCAAAGTGGAGATTAA |
| | | G |
| 809 | scFv (VH- | QVQLVQSGAEVKKPGASVKVSCKASGYTFTSYNMHWVRQ |
| | linker-VL) | APGQGLEWMGAIYPGNGDTSYNPKFKGRVTMTADKSTRTA |
| | | YMELSSLRSEDTAVYYCARSYFYGSSSWYFDVWGQGTTVT |
| | | VSSGGGGSGGGGSGGGGSGGGGSEIVLTQSPATLSLSPGER |
| | | ATLSCRASSSVSSMHWYQQKPGQAPRPLIFATSNLASGIPAR |
| | | FSGSGSGTDYTLTISSLEPEDAAVYYCQQWIFNPPTFGGGTK |
| | | VEIK |
| 810 | DNA scFv | Caagtgcagctcgtccagtccggtgcagaagtcaagaaacccggtgcttcagtgaaagtgtcc |
| | (VH-linker- | tgcaaggcctccggttacaccttcacctcctacaacatgcactgggtccgccaagccccgggc |
| | VL) | cagggactcgaatggatgggagccatctaccctggcaacggggacacctcatacaaccctaa |
| | | gttcaagggcagagtgaccatgactgcggacaagtccactagaacagcgtacatggagctga |
| | | gcagcctgcggtccgaggatactgccgtgtactactgcgcccgctcctacttctacggaagctc |
| | | gtcgtggtacttcgatgtctggggacagggcaccactgtgactgtgtcctccggtggcggagg |
| | | ctcgggggaggcggaagcggcggcgggggatcgggaggaggagggtccgaaattgtgc |
| | | tgactcagagccccgccaccctgagcttgtcccccggggaaagggcaacgctgtcatgccgc |
| | | gcctcgtcatccgtgtcctccatgcattggtaccagcagaagccgggacaggcccctcggccg |
| | | ctgatcttcgccacctccaatctcgcttccggcattccggcccggttctcgggaagcgggtcgg |
| | | ggaccgactataccctgaccatctctagccttgaacctgaggacgccgcggtgtactattgtcaa |
| | | cagtggatctttaaccccccaaccttcggtggaggcaccaaagtggagattaag |
| 811 | Full CAR | MALPVTALLLPLALLLHAARPQVQLVQSGAEVKKPGASVK |
| | amino acid | VSCKASGYTFTSYNMHWVRQAPGQGLEWMGAIYPGNGDT |
| | sequence | SYNPKFKGRVTMTADKSTRTAYMELSSLRSEDTAVYYCAR |
| | | SYFYGSSSWYFDVWGQGTTVTVSSGGGGSGGGGSGGGGSG |
| | | GGGSEIVLTQSPATLSLSPGERATLSCRASSSVSSMHWYQQK |
| | | PGQAPRPLIFATSNLASGIPARFSGSGSGTDYTLTISSLEPEDA |
| | | AVYYCQQWIFNPPTFGGGTKVEIKTTTPAPRPPTPAPTIASQP |
| | | LSLRPEACRPAAGGAVHTRGLDFACDIYIWAPLAGTCGVLL |
| | | LSLVITLYCKRGRKKLLYIFKQPFMRPVQTTQEEDGCSCRFP |
| | | EEEEGGCELRVKFSRSADAPAYQQGQNQLYNELNLGRREE |
| | | YDVLDKRRGRDPEMGGKPRRKNPQEGLYNELQKDKMAEA |
| | | YSEIGMKGERRRGKGHDGLYQGLSTATKDTYDALHMQALP |
| | | PR |
| 812 | Full CAR | ATGGCCCTCCCTGTCACCGCCCTGCTGCTTCCGCTGGCTC |
| | nucleotide | TTCTGCTCCACGCCGCTCGGCCCCAAGTGCAGCTCGTCCA |
| | sequence | GTCCGGTGCAGAAGTCAAGAAACCCGGTGCTTCAGTGAA |
| | | AGTGTCCTGCAAGGCCTCCGGTTACACCTTCACCTCCTAC |
| | | AACATGCACTGGGTCCGCCAAGCCCCGGGCCAGGGACTC |
| | | GAATGGATGGGAGCCATCTACCCTGGCAACGGGGACACC |
| | | TCATACAACCCTAAGTTCAAGGGCAGAGTGACCATGACT |
| | | GCGGACAAGTCCACTAGAACAGCGTACATGGAGCTGAGC |
| | | AGCCTGCGGTCCGAGGATACTGCCGTGTACTACTGCGCCC |
| | | GCTCCTACTTCTACGGAAGCTCGTCGTGGTACTTCGATGT |
| | | CTGGGGACAGGGCACCACTGTGACTGTGTCCTCCGGTGG |
| | | CGGAGGCTCGGGCGGAGGCGGAAGCGGCGGCGGGGGAT |
| | | CGGGAGGAGGAGGGTCCGAAATTGTGCTGACTCAGAGCC |
| | | CCGCCACCCTGAGCTTGTCCCCCGGGGAAAGGGCAACGC |
| | | TGTCATGCCGCGCCTCGTCATCCGTGTCCTCCATGCATTG |
| | | GTACCAGCAGAAGCCGGGACAGGCCCCTCGGCCGCTGAT |
| | | CTTCGCCACCTCCAATCTCGCTTCCGGCATTCCGGCCCGG |
| | | TTCTCGGGAAGCGGGTCGGGGACCGACTATACCCTGACC |
| | | ATCTCTAGCCTTGAACCTGAGGACGCCGCGGTGTACTATT |
| | | GTCAACAGTGGATCTTTAACCCCCCAACCTTCGGTGGAGG |
| | | CACCAAAGTGGAGATTAAGACCACTACCCCAGCACCGAG |
| | | GCCACCCACCCCGGCTCCTACCATCGCCTCCCAGCCTCTG |
| | | TCCCTGCGTCCGGAGGCATGTAGACCCGCAGCTGGTGGG |
| | | GCCGTGCATACCCGGGGTCTTGACTTCGCCTGCGATATCT |
| | | ACATTTGGGCCCCTCTGGCTGGTACTTGCGGGGTCCTGCT |
| | | GCTTTCACTCGTGATCACTCTTTACTGTAAGCGCGGTCGG |
| | | AAGAAGCTGCTGTACATCTTTAAGCAACCCTTCATGAGGC |
| | | CTGTGCAGACTACTCAAGAGGAGGACGGCTGTTCATGCC |
| | | GGTTCCCAGAGGAGGAGGAAGGCGGCTGCGAACTGCGCG |
| | | TGAAATTCAGCCGCAGCGCAGATGCTCCAGCCTACCAGC |
| | | AGGGGCAGAACCAGCTCTACAACGAACTCAATCTTGGTC |
| | | GGAGAGAGGAGTACGACGTGCTGGACAAGCGGAGAGGA |
| | | CGGGACCCAGAAATGGGCGGGAAGCCGCGCAGAAAGAA |
| | | TCCCCAAGAGGGCCTGTACAACGAGCTCCAAAAGGATAA |
| | | GATGGCAGAAGCCTATAGCGAGATTGGTATGAAAGGGGA |
| | | ACGCAGAAGAGGCAAAGGCCACGACGGACTGTACCAGG |
| | | GACTCAGCACCGCCACCAAGGACACCTATGACGCTCTTC |
| | | ACATGCAGGCCCTGCCGCCTCGG |
| CD20-C3H1 | | |
| 896 | HCDR1 | NYNLH |
| | (Kabat) | |
| 897 | HCDR2 | AIYPGNYDTSYNQKFKG |
| | (Kabat) | |
| 898 | HCDR3 | VDFGHSRYWYFDV |
| | (Kabat) | |
| 899 | HCDR1 | GYTFTNY |
| | (Chothia) | |
| 900 | HCDR2 | YPGNYD |
| | (Chothia) | |
| 901 | HCDR3 | VDFGHSRYWYFDV |
| | (Chothia) | |
| 903 | HCDR1 | GYTFTNYN |
| | (IMGT) | |
| 904 | HCDR2 | IYPGNYDT |
| | (IMGT) | |
| 905 | HCDR3 | ARVDFGHSRYWYFDV |
| | (IMGT) | |
| 906 | HCDR1 | GYTFTNYNLH |
| | (Combined) | |
| 907 | HCDR2 | AIYPGNYDTSYNQKFKG |
| | (Combined) | |
| 908 | HCDR3 | VDFGHSRYWYFDV |
| | (Combined) | |
| 909 | VH | QVQLVQSGAEVKKPGASVKVSCKASGYTFTNYNLHWVRQ |
| | | APGQGLEWMGAIYPGNYDTSYNQKFKGRVTMTADKSTSTA |
| | | YMELSSLRSEDTAVYYCARVDFGHSRYWYFDVWGQGTTV |
| | | TVSS |
| 910 | LCDR1 | RATSSVSSMN |
| | (Kabat) | |
| 911 | LCDR2 | ATSNLAS |
| | (Kabat) | |
| 912 | LCDR3 | QQWTFNPPT |
| | (Kabat) | |
| 913 | LCDR1 | TSSVSS |
| | (Chothia) | |
| 914 | LCDR2 | ATS |
| | (Chothia) | |
| 915 | LCDR3 | WTFNPP |
| | (Chothia) | |
| 916 | LCDR1 | SSVSS |
| | (IMGT) | |
| 917 | LCDR2 | ATS |
| | (IMGT) | |
| 918 | LCDR3 | QQWTFNPPT |
| | (IMGT) | |
| 919 | LCDR1 | RATSSVSSMN |
| | (Combined) | |
| 920 | LCDR2 | ATSNLAS |
| | (Combined) | |
| 921 | LCDR3 | QQWTFNPPT |
| | (Combined) | |
| 922 | VL | EIVLTQSPATLSLSPGERATLSCRATSSVSSMNWYQQKPGQA |
| | | PRPLIHATSNLASGIPARFSGSGSGTDYTLTISSLEPEDAAVY |
| | | YCQQWTFNPPTFGQGTKLEIK |
| 923 | scFv (VH- | QVQLVQSGAEVKKPGASVKVSCKASGYTFTNYNLHWVRQ |
| | linker-VL) | APGQGLEWMGAIYPGNYDTSYNQKFKGRVTMTADKSTSTA |
| | | YMELSSLRSEDTAVYYCARVDFGHSRYWYFDVWGQGTTV |
| | | TVSSGGGGSGGGGSGGGGSGGGGSEIVLTQSPATLSLSPGER |
| | | ATLSCRATSSVSSMNWYQQKPGQAPRPLIHATSNLASGIPAR |
| | | FSGSGSGTDYTLTISSLEPEDAAVYYCQQWTFNPPTFGQGTK |
| | | LEIK |
| 924 | Full CAR | MALPVTALLLPLALLLHAARPQVQLVQSGAEVKKPGASVK |
| | | VSCKASGYTFTNYNLHWVRQAPGQGLEWMGAIYPGNYDT |
| | | SYNQKFKGRVTMTADKSTSTAYMELSSLRSEDTAVYYCAR |
| | | VDFGHSRYWYFDVWGQGTTVTVSSGGGGSGGGGSGGGGS |
| | | GGGGSEIVLTQSPATLSLSPGERATLSCRATSSVSSMNWYQQ |
| | | KPGQAPRPLIHATSNLASGIPARFSGSGSGTDYTLTISSLEPED |
| | | AAVYYCQQWTFNPPTFGQGTKLEIKTTTPAPRPPTPAPTIAS |
| | | QPLSLRPEACRPAAGGAVHTRGLDFACDIYIWAPLAGTCGV |
| | | LLLSLVITLYCKRGRKKLLYIFKQPFMRPVQTTQEEDGCSCR |
| | | FPEEEEGGCELRVKFSRSADAPAYQQGQNQLYNELNLGRRE |
| | | EYDVLDKRRGRDPEMGGKPRRKNPQEGLYNELQKDKMAE |
| | | AYSEIGMKGERRRGKGHDGLYQGLSTATKDTYDALHMQA |
| | | LPPR |
| CD20-3H3 | | |
| 925 | HCDR1 | NYNLH |
| | (Kabat) | |
| 926 | HCDR2 | AIYPGNYDTSYNQKFKG |
| | (Kabat) | |
| 927 | HCDR3 | VDFGHSRYWYFDV |
| | (Kabat) | |
| 928 | HCDR1 | GYTFTNY |
| | (Chothia) | |
| 929 | HCDR2 | YPGNYD |
| | (Chothia) | |
| 930 | HCDR3 | VDFGHSRYWYFDV |
| | (Chothia) | |
| 931 | HCDR1 | GYTFTNYN |
| | (IMGT) | |
| 932 | HCDR2 | IYPGNYDT |
| | (IMGT) | |
| 933 | HCDR3 | ARVDFGHSRYWYFDV |
| | (IMGT) | |
| 934 | VH | QVQLVQSGAEVKKPGSSVKVSCKASGYTFTNYNLHWVRQ |
| | | APGQGLEWMGAIYPGNYDTSYNQKFKGRVTITADKSTSTA |
| | | YMELSSLRSEDTAVYYCARVDFGHSRYWYFDVWGQGTTV |
| | | TVSS |
| 935 | LCDR1 | RATSSVSSMN |
| | (Kabat) | |
| 936 | LCDR2 | ATSNLAS |
| | (Kabat) | |
| 937 | LCDR3 | QQWTFNPPT |
| | (Kabat) | |
| 938 | LCDR1 | TSSVSS |
| | (Chothia) | |
| 939 | LCDR2 | ATS |
| | (Chothia) | |
| 940 | LCDR3 | WTFNPP |
| | (Chothia) | |
| 941 | LCDR1 | SSVSS |
| | (IMGT) | |
| 942 | LCDR2 | ATS |
| | (IMGT) | |
| 943 | LCDR3 | QQWTFNPPT |
| | (IMGT) | |
| 944 | LCDR1 | RATSSVSSMN |
| | (Combined) | |
| 945 | LCDR2 | ATSNLAS |
| | (Combined) | |
| 946 | LCDR3 | QQWTFNPPT |
| | (Combined) | |
| 947 | VL | EIVLTQSPATLSLSPGERATLSCRATSSVSSMNWYQQKPGQA |
| | | PRPLIHATSNLASGIPARFSGSGSGTDYTLTISSLEPEDAAVY |
| | | YCQQWTFNPPTFGQGTKLEIK |
| 948 | scFv (VH- | QVQLVQSGAEVKKPGSSVKVSCKASGYTFTNYNLHWVRQ |
| | linker-VL) | APGQGLEWMGAIYPGNYDTSYNQKFKGRVTITADKSTSTA |
| | | YMELSSLRSEDTAVYYCARVDFGHSRYWYFDVWGQGTTV |
| | | TVSSGGGGSGGGGSGGGGSGGGGSEIVLTQSPATLSLSPGER |
| | | ATLSCRATSSVSSMNWYQQKPGQAPRPLIHATSNLASGIPAR |
| | | FSGSGSGTDYTLTISSLEPEDAAVYYCQQWTFNPPTFGQGTK |
| | | LEIK |
| 949 | Full CAR | MALPVTALLLPLALLLHAARPQVQLVQSGAEVKKPGSSVK |
| | | VSCKASGYTFTNYNLHWVRQAPGQGLEWMGAIYPGNYDT |
| | | SYNQKFKGRVTITADKSTSTAYMELSSLRSEDTAVYYCARV |
| | | DFGHSRYWYFDVWGQGTTVTVSSGGGGSGGGGSGGGGSG |
| | | GGGSEIVLTQSPATLSLSPGERATLSCRATSSVSSMNWYQQK |
| | | PGQAPRPLIHATSNLASGIPARFSGSGSGTDYTLTISSLEPEDA |
| | | AVYYCQQWTFNPPTFGQGTKLEIKTTTPAPRPPTPAPTIASQ |
| | | PLSLRPEACRPAAGGAVHTRGLDFACDIYIWAPLAGTCGVL |
| | | LLSLVITLYCKRGRKKLLYIFKQPFMRPVQTTQEEDGCSCRF |
| | | PEEEEGGCELRVKFSRSADAPAYQQGQNQLYNELNLGRREE |
| | | YDVLDKRRGRDPEMGGKPRRKNPQEGLYNELQKDKMAEA |
| | | YSEIGMKGERRRGKGHDGLYQGLSTATKDTYDALHMQALP |
| | | PR |
| CD20-C3H4 | | |
| 950 | HCDR1 | NYNLH |
| | (Kabat) | |
| 951 | HCDR2 | AIYPGNYDTSYNQKFKG |
| | (Kabat) | |
| 952 | HCDR3 | VDFGHSRYWYFDV |
| | (Kabat) | |
| 953 | HCDR1 | GYTFTNY |
| | (Chothia) | |
| 954 | HCDR2 | YPGNYD |
| | (Chothia) | |
| 955 | HCDR3 | VDFGHSRYWYFDV |
| | (Chothia) | |
| 956 | HCDR1 | GYTFTNYN |
| | (IMGT) | |
| 957 | HCDR2 | IYPGNYDT |
| | (IMGT) | |
| 958 | HCDR3 | ARVDFGHSRYWYFDV |
| | (IMGT) | |
| 959 | HCDR1 | GYTFTNYNLH |
| | (Combined) | |
| 960 | HCDR2 | AIYPGNYDTSYNQKFKG |
| | (Combined) | |
| 961 | HCDR3 | VDFGHSRYWYFDV |
| | (Combined) | |
| 962 | VH | QVQLVQSGAEVKKPGSSVKVSCKASGYTFTNYNLHWVRQ |
| | | APGQGLEWMGAIYPGNYDTSYNQKFKGRVTITADKSTSTA |
| | | YMELSSLRSEDTAVYYCARVDFGHSRYWYFDVWGQGTTV |
| | | TVSS |
| 963 | LCDR1 | RATSSVSSMN |
| | (Kabat) | |
| 964 | LCDR2 | ATSNLAS |
| | (Kabat) | |
| 965 | LCDR3 | QQWTFNPPT |
| | (Kabat) | |
| 966 | LCDR1 | TSSVSS |
| | (Chothia) | |
| 967 | LCDR2 | ATS |
| | (Chothia) | |
| 968 | LCDR3 | WTFNPP |
| | (Chothia) | |
| 969 | LCDR1 | SSVSS |
| | (IMGT) | |
| 970 | LCDR2 | ATS |
| | (IMGT) | |
| 971 | LCDR3 | QQWTFNPPT |
| | (IMGT) | |
| 972 | LCDR1 | RATSSVSSMN |
| | (Combined) | |
| 973 | LCDR2 | ATSNLAS |
| | (Combined) | |
| 974 | LCDR3 | QQWTFNPPT |
| | (Combined) | |
| 975 | VL | DIQLTQSPSFLSASVGDRVTITCRATSSVSSMNWYQQKPGK |
| | | APKPLIHATSNLASGVPSRFSGSGSGTEYTLTISSLQPEDFAT |
| | | YYCQQWTFNPPTFGQGTKLEIK |
| 976 | scFv (VH- | QVQLVQSGAEVKKPGSSVKVSCKASGYTFTNYNLHWVRQ |
| | linker-VL) | APGQGLEWMGAIYPGNYDTSYNQKFKGRVTITADKSTSTA |
| | | YMELSSLRSEDTAVYYCARVDFGHSRYWYFDVWGQGTTV |
| | | TVSSGGGGSGGGGSGGGGSGGGGSDIQLTQSPSFLSASVGD |
| | | RVTITCRATSSVSSMNWYQQKPGKAPKPLIHATSNLASGVP |
| | | SRFSGSGSGTEYTLTISSLQPEDFATYYCQQWTFNPPTFGQG |
| | | TKLEIK |
| 977 | Full CAR | MALPVTALLLPLALLLHAARPQVQLVQSGAEVKKPGSSVK |
| | | VSCKASGYTFTNYNLHWVRQAPGQGLEWMGAIYPGNYDT |
| | | SYNQKFKGRVTITADKSTSTAYMELSSLRSEDTAVYYCARV |
| | | DFGHSRYWYFDVWGQGTTVTVSSGGGGSGGGGSGGGGSG |
| | | GGGSDIQLTQSPSFLSASVGDRVTITCRATSSVSSMNWYQQ |
| | | KPGKAPKPLIHATSNLASGVPSRFSGSGSGTEYTLTISSLQPE |
| | | DFATYYCQQWTFNPPTFGQGTKLEIKTTTPAPRPPTPAPTIAS |
| | | QPLSLRPEACRPAAGGAVHTRGLDFACDIYIWAPLAGTCGV |
| | | LLLSLVITLYCKRGRKKLLYIFKQPFMRPVQTTQEEDGCSCR |
| | | FPEEEEGGCELRVKFSRSADAPAYQQGQNQLYNELNLGRRE |
| | | EYDVLDKRRGRDPEMGGKPRRKNPQEGLYNELQKDKMAE |
| | | AYSEIGMKGERRRGKGHDGLYQGLSTATKDTYDALHMQA |
| | | LPPR |
| CD20-C2H1 | | |
| 978 | HCDR1 | NYWMH |
| | (Kabat) | |
| 979 | HCDR2 | FITPTTGYPEYNQKFKD |
| | (Kabat) | |
| 980 | HCDR3 | RKVGKGVYYALDY |
| | (Kabat) | |
| 981 | HCDR1 | GYTFTNY |
| | (Chothia) | |
| 982 | HCDR2 | TPTTGY |
| | (Chothia) | |
| 983 | HCDR3 | RKVGKGVYYALDY |
| | (Chothia) | |
| 984 | HCDR1 | GYTFTNYW |
| | (IMGT) | |
| 985 | HCDR2 | ITPTTGYP |
| | (IMGT) | |
| 986 | HCDR3 | ARRKVGKGVYYALDY |
| | (IMGT) | |
| 987 | HCDR1 | GYTFTNYWMH |
| | (Combined) | |
| 988 | HCDR2 | FITPTTGYPEYNQKFKD |
| | (Combined) | |
| 989 | HCDR3 | RKVGKGVYYALDY |
| | (Combined) | |
| 990 | VH | QVQLVQSGAEVKKPGASVKVSCKASGYTFTNYWMHWVRQ |
| | | APGQGLEWMGFITPTTGYPEYNQKFKDRVTMTADKSTSTA |
| | | YMELSSLRSEDTAVYYCARRKVGKGVYYALDYWGQGTTV |
| | | TVSS |
| 991 | LCDR1 | RASGNIHNYLA |
| | (Kabat) | |
| 992 | LCDR2 | NTKTLAD |
| | (Kabat) | |
| 993 | LCDR3 | QHFWSSPWT |
| | (Kabat) | |
| 994 | LCDR1 | SGNIHNY |
| | (Chothia) | |
| 995 | LCDR2 | NTK |
| | (Chothia) | |
| 996 | LCDR3 | FWSSPW |
| | (Chothia) | |
| 997 | LCDR1 | GNIHNY |
| | (IMGT) | |
| 998 | LCDR2 | NTK |
| | (IMGT) | |
| 999 | LCDR3 | QHFWSSPWT |
| | (IMGT) | |
| 1000 | LCDR1 | RASGNIHNYLA |
| | (Combined) | |
| 1001 | LCDR2 | NTKTLAD |
| | (Combined) | |
| 1002 | LCDR3 | QHFWSSPWT |
| | (Combined) | |
| 1003 | VL | DIQMTQSPSSLSASVGDRVTITCRASGNIHNYLAWYQQKPG |
| | | KVPKLLIYNTKTLADGVPSRFSGSGSGTDYTLTISSLQPEDV |
| | | ATYYCQHFWSSPWTFGGGTKVEIK |
| 1004 | scFv (VH- | QVQLVQSGAEVKKPGASVKVSCKASGYTFTNYWMHWVRQ |
| | linker-VL) | APGQGLEWMGFITPTTGYPEYNQKFKDRVTMTADKSTSTA |
| | | YMELSSLRSEDTAVYYCARRKVGKGVYYALDYWGQGTTV |
| | | TVSSGGGGSGGGGSGGGGSGGGGSDIQMTQSPSSLSASVGD |
| | | RVTITCRASGNIHNYLAWYQQKPGKVPKLLIYNTKTLADGV |
| | | PSRFSGSGSGTDYTLTISSLQPEDVATYYCQHFWSSPWTFGG |
| | | GTKVEIK |
| 1005 | Full CAR | MALPVTALLLPLALLLHAARPQVQLVQSGAEVKKPGASVK |
| | | VSCKASGYTFTNYWMHWVRQAPGQGLEWMGFITPTTGYP |
| | | EYNQKFKDRVTMTADKSTSTAYMELSSLRSEDTAVYYCAR |
| | | RKVGKGVYYALDYWGQGTTVTVSSGGGGSGGGGSGGGGS |
| | | GGGGSDIQMTQSPSSLSASVGDRVTITCRASGNIHNYLAWY |
| | | QQKPGKVPKLLIYNTKTLADGVPSRFSGSGSGTDYTLTISSL |
| | | QPEDVATYYCQHFWSSPWTFGGGTKVEIKTTTPAPRPPTPA |
| | | PTIASQPLSLRPEACRPAAGGAVHTRGLDFACDIYIWAPLAG |
| | | TCGVLLLSLVITLYCKRGRKKLLYIFKQPFMRPVQTTQEEDG |
| | | CSCRFPEEEEGGCELRVKFSRSADAPAYQQGQNQLYNELNL |
| | | GRREEYDVLDKRRGRDPEMGGKPRRKNPQEGLYNELQKD |
| | | KMAEAYSEIGMKGERRRGKGHDGLYQGLSTATKDTYDAL |
| | | HMQALPPR |
| CD20-C2H2 | | |
| 1006 | HCDR1 | NYWMH |
| | (Kabat) | |
| 1007 | HCDR2 | FITPTTGYPEYNQKFKD |
| | (Kabat) | |
| 1008 | HCDR3 | RKVGKGVYYALDY |
| | (Kabat) | |
| 1009 | HCDR1 | GYTFTNY |
| | (Chothia) | |
| 1010 | HCDR2 | TPTTGY |
| | (Chothia) | |
| 1011 | HCDR3 | RKVGKGVYYALDY |
| | (Chothia) | |
| 1012 | HCDR1 | GYTFTNYW |
| | (IMGT) | |
| 1013 | HCDR2 | ITPTTGYP |
| | (IMGT) | |
| 1014 | HCDR3 | ARRKVGKGVYYALDY |
| | (IMGT) | |
| 1015 | HCDR1 | GYTFTNYWMH |
| | (Combined) | |
| 1016 | HCDR2 | FITPTTGYPEYNQKFKD |
| | (Combined) | |
| 1017 | HCDR3 | RKVGKGVYYALDY |
| | (Combined) | |
| 1018 | VH | QVQLVQSGAEVKKPGSSVKVSCKASGYTFTNYWMHWVRQ |
| | | APGQGLEWMGFITPTTGYPEYNQKFKDRVTITADKSTSTAY |
| | | MELSSLRSEDTAVYYCARRKVGKGVYYALDYWGQGTTVT |
| | | VSS |
| 1019 | LCDR1 | RASGNIHNYLA |
| | (Kabat) | |
| 1020 | LCDR2 | NTKTLAD |
| | (Kabat) | |
| 1021 | LCDR3 | QHFWSSPWT |
| | (Kabat) | |
| 1022 | LCDR1 | SGNIHNY |
| | (Chothia) | |
| 1023 | LCDR2 | NTK |
| | (Chothia) | |
| 1024 | LCDR3 | FWSSPW |
| | (Chothia) | |
| 1025 | LCDR1 | GNIHNY |
| | (IMGT) | |
| 1026 | LCDR2 | NTK |
| | (IMGT) | |
| 1027 | LCDR3 | QHFWSSPWT |
| | (IMGT) | |
| 1028 | LCDR1 | RASGNIHNYLA |
| | (Combined) | |
| 1029 | LCDR2 | NTKTLAD |
| | (Combined) | |
| 1030 | LCDR3 | QHFWSSPWT |
| | (Combined) | |
| 1031 | VL | DIQMTQSPSSLSASVGDRVTITCRASGNIHNYLAWYQQKPG |
| | | KVPKLLIYNTKTLADGVPSRFSGSGSGTDYTLTISSLQPEDV |
| | | ATYYCQHFWSSPWTFGGGTKVEIK |
| 1032 | scFv (VH- | QVQLVQSGAEVKKPGSSVKVSCKASGYTFTNYWMHWVRQ |
| | linker-VL) | APGQGLEWMGFITPTTGYPEYNQKFKDRVTITADKSTSTAY |
| | | MELSSLRSEDTAVYYCARRKVGKGVYYALDYWGQGTTVT |
| | | VSSGGGGSGGGGSGGGGSGGGGSDIQMTQSPSSLSASVGDR |
| | | VTITCRASGNIHNYLAWYQQKPGKVPKLLIYNTKTLADGVP |
| | | SRFSGSGSGTDYTLTISSLQPEDVATYYCQHFWSSPWTFGGG |
| | | TKVEIK |
| 1033 | Full CAR | MALPVTALLLPLALLLHAARPQVQLVQSGAEVKKPGSSVK |
| | | VSCKASGYTFTNYWMHWVRQAPGQGLEWMGFITPTTGYP |
| | | EYNQKFKDRVTITADKSTSTAYMELSSLRSEDTAVYYCARR |
| | | KVGKGVYYALDYWGQGTTVTVSSGGGGSGGGGSGGGGSG |
| | | GGGSDIQMTQSPSSLSASVGDRVTITCRASGNIHNYLAWYQ |
| | | QKPGKVPKLLIYNTKTLADGVPSRFSGSGSGTDYTLTISSLQ |
| | | PEDVATYYCQHFWSSPWTFGGGTKVEIKTTTPAPRPPTPAPT |
| | | IASQPLSLRPEACRPAAGGAVHTRGLDFACDIYIWAPLAGTC |
| | | GVLLLSLVITLYCKRGRKKLLYIFKQPFMRPVQTTQEEDGCS |
| | | CRFPEEEEGGCELRVKFSRSADAPAYQQGQNQLYNELNLGR |
| | | REEYDVLDKRRGRDPEMGGKPRRKNPQEGLYNELQKDKM |
| | | AEAYSEIGMKGERRRGKGHDGLYQGLSTATKDTYDALHM |
| | | QALPPR |
| CD20-C2H3 | | |
| 1034 | HCDR1 | NYWMH |
| | (Kabat) | |
| 1035 | HCDR2 | FITPTTGYPEYNQKFKD |
| | (Kabat) | |
| 1036 | HCDR3 | RKVGKGVYYALDY |
| | (Kabat) | |
| 1037 | HCDR1 | GYTFTNY |
| | (Chothia) | |
| 1038 | HCDR2 | TPTTGY |
| | (Chothia) | |
| 1039 | HCDR3 | RKVGKGVYYALDY |
| | (Chothia) | |
| 1040 | HCDR1 | GYTFTNYW |
| | (IMGT) | |
| 1041 | HCDR2 | ITPTTGYP |
| | (IMGT) | |
| 1042 | HCDR3 | ARRKVGKGVYYALDY |
| | (IMGT) | |
| 1043 | HCDR1 | GYTFTNYWMH |
| | (Combined) | |
| 1044 | HCDR2 | FITPTTGYPEYNQKFKD |
| | (Combined) | |
| 1045 | HCDR3 | RKVGKGVYYALDY |
| | (Combined) | |
| 1046 | VH | QVQLVQSGAEVKKPGASVKVSCKASGYTFTNYWMHWVRQ |
| | | APGQGLEWMGFITPTTGYPEYNQKFKDRVTMTADKSTSTA |
| | | YMELSSLRSEDTAVYYCARRKVGKGVYYALDYWGQGTTV |
| | | TVSS |
| 1047 | LCDR1 | RASGNIHNYLA |
| | (Kabat) | |
| 1048 | LCDR2 | NTKTLAD |
| | (Kabat) | |
| 1049 | LCDR3 | QHFWSSPWT |
| | (Kabat) | |
| 1050 | LCDR1 | SGNIHNY |
| | (Chothia) | |
| 1051 | LCDR2 | NTK |
| | (Chothia) | |
| 1052 | LCDR3 | FWSSPW |
| | (Chothia) | |
| 1053 | LCDR1 | GNIHNY |
| | (IMGT) | |
| 1054 | LCDR2 | NTK |
| | (IMGT) | |
| 1055 | LCDR3 | QHFWSSPWT |
| | (IMGT) | |
| 1056 | LCDR1 | RASGNIHNYLA |
| | (Combined) | |
| 1057 | LCDR2 | NTKTLAD |
| | (Combined) | |
| 1058 | LCDR3 | QHFWSSPWT |
| | (Combined) | |
| 1059 | VL | AIRMTQSPFSLSASVGDRVTITCRASGNIHNYLAWYQQKPA |
| | | KAPKLFIYNTKTLADGVPSRFSGSGSGTDYTLTISSLQPEDFA |
| | | TYYCQHFWSSPWTFGGGTKVEIK |
| 1060 | scFv (VH- | QVQLVQSGAEVKKPGASVKVSCKASGYTFTNYWMHWVRQ |
| | linker-VL) | APGQGLEWMGFITPTTGYPEYNQKFKDRVTMTADKSTSTA |
| | | YMELSSLRSEDTAVYYCARRKVGKGVYYALDYWGQGTTV |
| | | TVSSGGGGSGGGGSGGGGSGGGGSAIRMTQSPFSLSASVGD |
| | | RVTITCRASGNIHNYLAWYQQKPAKAPKLFIYNTKTLADGV |
| | | PSRFSGSGSGTDYTLTISSLQPEDFATYYCQHFWSSPWTFGG |
| | | GTKVEIK |
| 1061 | Full CAR | MALPVTALLLPLALLLHAARPQVQLVQSGAEVKKPGASVK |
| | | VSCKASGYTFTNYWMHWVRQAPGQGLEWMGFITPTTGYP |
| | | EYNQKFKDRVTMTADKSTSTAYMELSSLRSEDTAVYYCAR |
| | | RKVGKGVYYALDYWGQGTTVTVSSGGGGSGGGGSGGGGS |
| | | GGGGSAIRMTQSPFSLSASVGDRVTITCRASGNIHNYLAWY |
| | | QQKPAKAPKLFIYNTKTLADGVPSRFSGSGSGTDYTLTISSL |
| | | QPEDFATYYCQHFWSSPWTFGGGTKVEIKTTTPAPRPPTPAP |
| | | TIASQPLSLRPEACRPAAGGAVHTRGLDFACDIYIWAPLAGT |
| | | CGVLLLSLVITLYCKRGRKKLLYIFKQPFMRPVQTTQEEDGC |
| | | SCRFPEEEEGGCELRVKFSRSADAPAYQQGQNQLYNELNLG |
| | | RREEYDVLDKRRGRDPEMGGKPRRKNPQEGLYNELQKDK |
| | | MAEAYSEIGMKGERRRGKGHDGLYQGLSTATKDTYDALH |
| | | MQALPPR |
| CD20-C2H4 | | |
| 1062 | HCDR1 | NYWMH |
| | (Kabat) | |
| 1063 | HCDR2 | FITPTTGYPEYNQKFKD |
| | (Kabat) | |
| 1064 | HCDR3 | RKVGKGVYYALDY |
| | (Kabat) | |
| 1065 | HCDR1 | GYTFTNY |
| | (Chothia) | |
| 1066 | HCDR2 | TPTTGY |
| | (Chothia) | |
| 1067 | HCDR3 | RKVGKGVYYALDY |
| | (Chothia) | |
| 1068 | HCDR1 | GYTFTNYW |
| | (IMGT) | |
| 1069 | HCDR2 | ITPTTGYP |
| | (IMGT) | |
| 1070 | HCDR3 | ARRKVGKGVYYALDY |
| | (IMGT) | |
| 1071 | HCDR1 | GYTFTNYWMH |
| | (Combined) | |
| 1072 | HCDR2 | FITPTTGYPEYNQKFKD |
| | (Combined) | |
| 1073 | HCDR3 | RKVGKGVYYALDY |
| | (Combined) | |
| 1074 | VH | QVQLVQSGAEVKKPGSSVKVSCKASGYTFTNYWMHWVRQ |
| | | APGQGLEWMGFITPTTGYPEYNQKFKDRVTITADKSTSTAY |
| | | MELSSLRSEDTAVYYCARRKVGKGVYYALDYWGQGTTVT |
| | | VSS |
| 1075 | LCDR1 | RASGNIHNYLA |
| | (Kabat) | |
| 1076 | LCDR2 | NTKTLAD |
| | (Kabat) | |
| 1077 | LCDR3 | QHFWSSPWT |
| | (Kabat) | |
| 1078 | LCDR1 | SGNIHNY |
| | (Chothia) | |
| 1079 | LCDR2 | NTK |
| | (Chothia) | |
| 1080 | LCDR3 | FWSSPW |
| | (Chothia) | |
| 1081 | LCDR1 | GNIHNY |
| | (IMGT) | |
| 1082 | LCDR2 | NTK |
| | (IMGT) | |
| 1083 | LCDR3 | QHFWSSPWT |
| | (IMGT) | |
| 1084 | LCDR1 | RASGNIHNYLA |
| | (Combined) | |
| 1085 | LCDR2 | NTKTLAD |
| | (Combined) | |
| 1086 | LCDR3 | QHFWSSPWT |
| | (Combined) | |
| 1087 | VL | AIRMTQSPFSLSASVGDRVTITCRASGNIHNYLAWYQQKPA |
| | | KAPKLFIYNTKTLADGVPSRFSGSGSGTDYTLTISSLQPEDFA |
| | | TYYCQHFWSSPWTFGGGTKVEIK |
| 1088 | scFv (VH- | QVQLVQSGAEVKKPGSSVKVSCKASGYTFTNYWMHWVRQ |
| | linker-VL) | APGQGLEWMGFITPTTGYPEYNQKFKDRVTITADKSTSTAY |
| | | MELSSLRSEDTAVYYCARRKVGKGVYYALDYWGQGTTVT |
| | | VSSGGGGSGGGGSGGGGSGGGGSAIRMTQSPFSLSASVGDR |
| | | VTITCRASGNIHNYLAWYQQKPAKAPKLFIYNTKTLADGVP |
| | | SRFSGSGSGTDYTLTISSLQPEDFATYYCQHFWSSPWTFGGG |
| | | TKVEIK |
| 1089 | Full CAR | MALPVTALLLPLALLLHAARPQVQLVQSGAEVKKPGSSVK |
| | | VSCKASGYTFTNYWMHWVRQAPGQGLEWMGFITPTTGYP |
| | | EYNQKFKDRVTITADKSTSTAYMELSSLRSEDTAVYYCARR |
| | | KVGKGVYYALDYWGQGTTVTVSSGGGGSGGGGSGGGGSG |
| | | GGGSAIRMTQSPFSLSASVGDRVTITCRASGNIHNYLAWYQ |
| | | QKPAKAPKLFIYNTKTLADGVPSRFSGSGSGTDYTLTISSLQP |
| | | EDFATYYCQHFWSSPWTFGGGTKVEIKTTTPAPRPPTPAPTI |
| | | ASQPLSLRPEACRPAAGGAVHTRGLDFACDIYIWAPLAGTC |
| | | GVLLLSLVITLYCKRGRKKLLYIFKQPFMRPVQTTQEEDGCS |
| | | CRFPEEEEGGCELRVKFSRSADAPAYQQGQNQLYNELNLGR |
| | | REEYDVLDKRRGRDPEMGGKPRRKNPQEGLYNELQKDKM |
| | | AEAYSEIGMKGERRRGKGHDGLYQGLSTATKDTYDALHM |
| | | QALPPR |
| CD20-C5H2 | | |
| 1090 | HCDR1 | SYNMH |
| | (Kabat) | |
| 1091 | HCDR2 | AIYPGNGDTSYNPKFKG |
| | (Kabat) | |
| 1092 | HCDR3 | SYFYGSSSWYFDV |
| | (Kabat) | |
| 1093 | HCDR1 | GYTFTSY |
| | (Chothia) | |
| 1094 | HCDR2 | YPGNGD |
| | (Chothia) | |
| 1095 | HCDR3 | SYFYGSSSWYFDV |
| | (Chothia) | |
| 1096 | HCDR1 | GYTFTSYN |
| | (IMGT) | |
| 1097 | HCDR2 | IYPGNGDT |
| | (IMGT) | |
| 1098 | HCDR3 | ARSYFYGSSSWYFDV |
| | (IMGT) | |
| 1099 | HCDR1 | GYTFTSYNMH |
| | (Combined) | |
| 1100 | HCDR2 | AIYPGNGDTSYNPKFKG |
| | (Combined) | |
| 1101 | HCDR3 | SYFYGSSSWYFDV |
| | (Combined) | |
| 1102 | VH | QVQLVQSGAEVKKPGASVKVSCKASGYTFTSYNMHWVRQ |
| | | APGQGLEWMGAIYPGNGDTSYNPKFKGRVTMTADKSTRTA |
| | | YMELSSLRSEDTAVYYCARSYFYGSSSWYFDVWGQGTTVT |
| | | VSS |
| 1103 | LCDR1 | RASSSVSSMH |
| | (Kabat) | |
| 1104 | LCDR2 | ATSNLAS |
| | (Kabat) | |
| 1105 | LCDR3 | QQWIFNPPT |
| | (Kabat) | |
| 1106 | LCDR1 | SSSVSS |
| | (Chothia) | |
| 1107 | LCDR2 | ATS |
| | (Chothia) | |
| 1108 | LCDR3 | WIFNPP |
| | (Chothia) | |
| 1109 | LCDR1 | SSVSS |
| | (IMGT) | |
| 1110 | LCDR2 | ATS |
| | (IMGT) | |
| 1111 | LCDR3 | QQWIFNPPT |
| | (IMGT) | |
| 1112 | LCDR1 | RASSSVSSMH |
| | (Combined) | |
| 1113 | LCDR2 | ATSNLAS |
| | (Combined) | |
| 1114 | LCDR3 | QQWIFNPPT |
| | (Combined) | |
| 1115 | VL | DIQLTQSPSFLSASVGDRVTITCRASSSVSSMHWYQQKPGKA |
| | | PKPLIFATSNLASGVPSRFSGSGSGTEYTLTISSLQPEDFATYY |
| | | CQQWIFNPPTFGGGTKVEIK |
| 1116 | scFv (VH- | QVQLVQSGAEVKKPGASVKVSCKASGYTFTSYNMHWVRQ |
| | linker-VL) | APGQGLEWMGAIYPGNGDTSYNPKFKGRVTMTADKSTRTA |
| | | YMELSSLRSEDTAVYYCARSYFYGSSSWYFDVWGQGTTVT |
| | | VSSGGGGGGGGSGGGGSGGGGSDIQLTQSPSFLSASVGDR |
| | | VTITCRASSSVSSMHWYQQKPGKAPKPLIFATSNLASGVPSR |
| | | FSGSGSGTEYTLTISSLQPEDFATYYCQQWIFNPPTFGGGTK |
| | | VEIK |
| 1117 | Full CAR | MALPVTALLLPLALLLHAARPQVQLVQSGAEVKKPGASVK |
| | | VSCKASGYTFTSYNMHWVRQAPGQGLEWMGAIYPGNGDT |
| | | SYNPKFKGRVTMTADKSTRTAYMELSSLRSEDTAVYYCAR |
| | | SYFYGSSSWYFDVWGQGTTVTVSSGGGGSGGGGSGGGGSG |
| | | GGGSDIQLTQSPSFLSASVGDRVTITCRASSSVSSMHWYQQK |
| | | PGKAPKPLIFATSNLASGVPSRFSGSGSGTEYTLTISSLQPEDF |
| | | ATYYCQQWIFNPPTFGGGTKVEIKTTTPAPRPPTPAPTIASQP |
| | | LSLRPEACRPAAGGAVHTRGLDFACDIYIWAPLAGTCGVLL |
| | | LSLVITLYCKRGRKKLLYIFKQPFMRPVQTTQEEDGCSCRFP |
| | | EEEEGGCELRVKFSRSADAPAYQQGQNQLYNELNLGRREE |
| | | YDVLDKRRGRDPEMGGKPRRKNPQEGLYNELQKDKMAEA |
| | | YSEIGMKGERRRGKGHDGLYQGLSTATKDTYDALHMQALP |
| | | PR |
| CD20-C5H3 | | |
| 1118 | HCDR1 | SYNMH |
| | (Kabat) | |
| 1119 | HCDR2 | AIYPGNGDTSYNPKFKG |
| | (Kabat) | |
| 1120 | HCDR3 | SYFYGSSSWYFDV |
| | (Kabat) | |
| 1121 | HCDR1 | GYTFTSY |
| | (Chothia) | |
| 1122 | HCDR2 | YPGNGD |
| | (Chothia) | |
| 1123 | HCDR3 | SYFYGSSSWYFDV |
| | (Chothia) | |
| 1124 | HCDR1 | GYTFTSYN |
| | (IMGT) | |
| 1125 | HCDR2 | IYPGNGDT |
| | (IMGT) | |
| 1126 | HCDR3 | ARSYFYGSSSWYFDV |
| | (IMGT) | |
| 1127 | HCDR1 | GYTFTSYNMH |
| | (Combined) | |
| 1128 | HCDR2 | AIYPGNGDTSYNPKFKG |
| | (Combined) | |
| 1129 | HCDR3 | SYFYGSSSWYFDV |
| | (Combined) | |
| 1130 | VH | QVQLVQSGAEVKKPGSSVKVSCKASGYTFTSYNMHWVRQ |
| | | APGQGLEWMGAIYPGNGDTSYNPKFKGRVTITADKSTRTA |
| | | YMELSSLRSEDTAVYYCARSYFYGSSSWYFDVWGQGTTVT |
| | | VSS |
| 1131 | LCDR1 | RASSSVSSMH |
| | (Kabat) | |
| 1132 | LCDR2 | ATSNLAS |
| | (Kabat) | |
| 1133 | LCDR3 | QQWIFNPPT |
| | (Kabat) | |
| 1134 | LCDR1 | SSSVSS |
| | (Chothia) | |
| 1135 | LCDR2 | ATS |
| | (Chothia) | |
| 1136 | LCDR3 | WIFNPP |
| | (Chothia) | |
| 1137 | LCDR1 | SSVSS |
| | (IMGT) | |
| 1138 | LCDR2 | ATS |
| | (IMGT) | |
| 1139 | LCDR3 | QQWIFNPPT |
| | (IMGT) | |
| 1140 | LCDR1 | RASSSVSSMH |
| | (Combined) | |
| 1141 | LCDR2 | ATSNLAS |
| | (Combined) | |
| 1142 | LCDR3 | QQWIFNPPT |
| | (Combined) | |
| 1143 | VL | EIVLTQSPATLSLSPGERATLSCRASSSVSSMHWYQQKPGQA |
| | | PRPLIFATSNLASGIPARFSGSGSGTDYTLTISSLEPEDAAVYY |
| | | CQQWIFNPPTFGGGTKVEIK |
| 1144 | scFv (VH- | QVQLVQSGAEVKKPGSSVKVSCKASGYTFTSYNMHWVRQ |
| | linker-VL) | APGQGLEWMGAIYPGNGDTSYNPKFKGRVTITADKSTRTA |
| | | YMELSSLRSEDTAVYYCARSYFYGSSSWYFDVWGQGTTVT |
| | | VSSGGGGSGGGGSGGGGSGGGGSEIVLTQSPATLSLSPGER |
| | | ATLSCRASSSVSSMHWYQQKPGQAPRPLIFATSNLASGIPAR |
| | | FSGSGSGTDYTLTISSLEPEDAAVYYCQQWIFNPPTFGGGTK |
| | | VEIK |
| 1145 | Full CAR | MALPVTALLLPLALLLHAARPQVQLVQSGAEVKKPGSSVK |
| | | VSCKASGYTFTSYNMHWVRQAPGQGLEWMGAIYPGNGDT |
| | | SYNPKFKGRVTITADKSTRTAYMELSSLRSEDTAVYYCARS |
| | | YFYGSSSWYFDVWGQGTTVTVSSGGGGSGGGGSGGGGSG |
| | | GGGSEIVLTQSPATLSLSPGERATLSCRASSSVSSMHWYQQK |
| | | PGQAPRPLIFATSNLASGIPARFSGSGSGTDYTLTISSLEPEDA |
| | | AVYYCQQWIFNPPTFGGGTKVEIKTTTPAPRPPTPAPTIASQP |
| | | LSLRPEACRPAAGGAVHTRGLDFACDIYIWAPLAGTCGVLL |
| | | LSLVITLYCKRGRKKLLYIFKQPFMRPVQTTQEEDGCSCRFP |
| | | EEEEGGCELRVKFSRSADAPAYQQGQNQLYNELNLGRREE |
| | | YDVLDKRRGRDPEMGGKPRRKNPQEGLYNELQKDKMAEA |
| | | YSEIGMKGERRRGKGHDGLYQGLSTATKDTYDALHMQALP |
| | | PR |
| CD20-C5H4 | | |
| 1146 | HCDR1 | SYNMH |
| | (Kabat) | |
| 1147 | HCDR2 | AIYPGNGDTSYNPKFKG |
| | (Kabat) | |
| 1148 | HCDR3 | SYFYGSSSWYFDV |
| | (Kabat) | |
| 1149 | HCDR1 | GYTFTSY |
| | (Chothia) | |
| 1150 | HCDR2 | YPGNGD |
| | (Chothia) | |
| 1151 | HCDR3 | SYFYGSSSWYFDV |
| | (Chothia) | |
| 1152 | HCDR1 | GYTFTSYN |
| | (IMGT) | |
| 1153 | HCDR2 | IYPGNGDT |
| | (IMGT) | |
| 1154 | HCDR3 | ARSYFYGSSSWYFDV |
| | (IMGT) | |
| 1155 | HCDR1 | GYTFTSYNMH |
| | (Combined) | |
| 1156 | HCDR2 | AIYPGNGDTSYNPKFKG |
| | (Combined) | |
| 1157 | HCDR3 | SYFYGSSSWYFDV |
| | (Combined) | |
| 1158 | VH | QVQLVQSGAEVKKPGSSVKVSCKASGYTFTSYNMHWVRQ |
| | | APGQGLEWMGAIYPGNGDTSYNPKFKGRVTITADKSTRTA |
| | | YMELSSLRSEDTAVYYCARSYFYGSSSWYFDVWGQGTTVT |
| | | VSS |
| 1159 | LCDR1 | RASSSVSSMH |
| | (Kabat) | |
| 1160 | LCDR2 | ATSNLAS |
| | (Kabat) | |
| 1161 | LCDR3 | QQWIFNPPT |
| | (Kabat) | |
| 1162 | LCDR1 | SSSVSS |
| | (Chothia) | |
| 1163 | LCDR2 | ATS |
| | (Chothia) | |
| 1164 | LCDR3 | WIFNPP |
| | (Chothia) | |
| 1165 | LCDR1 | SSVSS |
| | (IMGT) | |
| 1166 | LCDR2 | ATS |
| | (IMGT) | |
| 1167 | LCDR3 | QQWIFNPPT |
| | (IMGT) | |
| 1168 | LCDR1 | RASSSVSSMH |
| | (Combined) | |
| 1169 | LCDR2 | ATSNLAS |
| | (Combined) | |
| 1170 | LCDR3 | QQWIFNPPT |
| | (Combined) | |
| 1171 | VL | DIQLTQSPSFLSASVGDRVTITCRASSSVSSMHWYQQKPGKA |
| | | PKPLIFATSNLASGVPSRFSGSGSGTEYTLTISSLQPEDFATYY |
| | | CQQWIFNPPTFGGGTKVEIK |
| 1172 | scFv (VH- | QVQLVQSGAEVKKPGSSVKVSCKASGYTFTSYNMHWVRQ |
| | linker-VL) | APGQGLEWMGAIYPGNGDTSYNPKFKGRVTITADKSTRTA |
| | | YMELSSLRSEDTAVYYCARSYFYGSSSWYFDVWGQGTTVT |
| | | VSSGGGGSGGGGSGGGGSGGGGSDIQLTQSPSFLSASVGDR |
| | | VTITCRASSSVSSMHWYQQKPGKAPKPLIFATSNLASGVPSR |
| | | FSGSGSGTEYTLTISSLQPEDFATYYCQQWIFNPPTFGGGTK |
| | | VEIK |
| 1173 | Full CAR | MALPVTALLLPLALLLHAARPQVQLVQSGAEVKKPGSSVK |
| | | VSCKASGYTFTSYNMHWVRQAPGQGLEWMGAIYPGNGDT |
| | | SYNPKFKGRVTITADKSTRTAYMELSSLRSEDTAVYYCARS |
| | | YFYGSSSWYFDVWGQGTTVTVSSGGGGSGGGGSGGGGSG |
| | | GGGSDIQLTQSPSFLSASVGDRVTITCRASSSVSSMHWYQQK |
| | | PGKAPKPLIFATSNLASGVPSRFSGSGSGTEYTLTISSLQPEDF |
| | | ATYYCQQWIFNPPTFGGGTKVEIKTTTPAPRPPTPAPTIASQP |
| | | LSLRPEACRPAAGGAVHTRGLDFACDIYIWAPLAGTCGVLL |
| | | LSLVITLYCKRGRKKLLYIFKQPFMRPVQTTQEEDGCSCRFP |
| | | EEEEGGCELRVKFSRSADAPAYQQGQNQLYNELNLGRREE |
| | | YDVLDKRRGRDPEMGGKPRRKNPQEGLYNELQKDKMAEA |
| | | YSEIGMKGERRRGKGHDGLYQGLSTATKDTYDALHMQALP |
| | | PR |
| CD20-C3 | | |
| 1174 | VH | QVQLQQPGAELVKPGASVKMSCKASGYTFTNYNLHWVKQ |
| | | TPGQGLEWIGAIYPGNYDTSYNQKFKGKATLTADKSSSTAY |
| | | MLLSSLTSEDSAVYFCARVDFGHSRYWYFDVWGAGTTVTV |
| | | SS |
| 1175 | VL | QIVLSQSPAILSASPGEKVTMTCRATSSVSSMNWYQQKPGSF |
| | | PRPWIHATSNLASGVPARFSGSGSGTSYSLTISRVEAEDAAT |
| | | YYCQQWTFNPPTFGAGAKLELK |
| CD20-C5 | | |
| 1176 | VH | QVQLQQPGAELVKPGASVKMSCKASGYTFTSYNMHWVKQ |
| | | TPGQGLEWIGAIYPGNGDTSYNPKFKGKATLTADKSSRTAY |
| | | IHLSSLTSEDSVVYYCARSYFYGSSSWYFDVWGAGTTVTVS |
| | | S |
| 1177 | VL | QIILSQSPAILSASPGEKVTLTCRASSSVSSMHWYQQKPGSSP |
| | | KPWIFATSNLASGVPARFTGSGSGTSYSLTISRVEAEDAATY |
| | | YCQQWIFNPPTFGGGTSLEIK |
| CD20-C2 | | |
| 1178 | VH | QVHLQQSGAELAKPGASVKMSCKASGYTFTNYWMHWVK |
| | | QRPGQGLEWIGFITPTTGYPEYNQKFKDKATLTADKSSSTA |
| | | YMQLSSLTSEDSAVYYCARRKVGKGVYYALDYWGQGTSV |
| | | TVSS |
| 1179 | VL | DILMTQSPASLSASVGETVTITCRASGNIHNYLAWYQQKQG |
| | | NSPQLLVYNTKTLADGVPSRFSGSGSGTQYSLKINSLQTEDF |
| | | GTYYCQHFWSSPWTFGGGTKLEIK |

[0360] CARs that bind to CD22 are known in the art. For example, those disclosed in WO2018/067992 or WO2016/164731 can be used in accordance with the present disclosure. Any known CD22 CAR, for example, the CD22 antigen binding domain of any known CD22 CAR, in the art can be used in accordance with the present disclosure.

[0361] Exemplary CD22-binding sequences or CD22 CAR sequences are disclosed in, for example, Tables 6A, 6B, 7A, 7B, 7C, 8A, 8B, 9A, 9B, 10A, and 10B of WO2016164731 and Tables 6-10 of WO2018067992. In some embodiments, the CD22 CAR sequences comprise a CDR, variable region, scFv or full-length sequence of a CD22 CAR disclosed in WO2018067992 or WO2016164731.

[0362] In embodiments, the CAR comprises an antigen binding domain that binds to CD22 (CD22 CAR). In some embodiments, the antigen binding domain targets human CD22. In some embodiments, the antigen binding domain includes a single chain Fv sequence as described herein.

[0363] The sequences of human CD22 CAR are provided below. In some embodiments, a human CD22 CAR is CAR22-65.

Human CD22 CAR scFv sequence
(SEQ ID NO: 753)
EVQLQQSGPGLVKPSQTLSLTCAISGDSMLSNSDTWNWIRQSPSR
GLEWLGRTYHRSTWYDDYASSVRGRVSINVDTSKNQYSLQLNAVT
PEDTGVYYCARVRLQDGNSWSDAFDVWGQGTMVTVSSGGGGSGGG
GGGGGSQSALTQPASASGSPGQSVTISCTGTSSDVGGYNYVSWYQ
QHPGKAPKLMIYDVSNRPSGVSNRFSGSKSGNTASLTISGLQAED
EADYYCSSYTSSSTLYVFGTGTQLTVL
Human CD22 CAR heavy chain variable region
(SEQ ID NO: 754)
EVQLQQSGPGLVKPSQTLSLTCAISGDSMLSNSDTWNWIRQSPSR
GLEWLGRTYHRSTWYDDYASSVRGRVSINVDTSKNQYSLQLNAVT
PEDTGVYYCARVRLQDGNSWSDAFDVWGQGTMVTVSS
Human CD22 CAR light chain variable region
(SEQ ID NO 755)
QSALTQPASASGSPGQSVTISCTGTSSDVGGYNYVSWYQQHPGKA
PKLMIYDVSNRPSGVSNRFSGSKSGNTASLTISGLQAEDEADYYC
SSYTSSSTLYVFGTGTQLTVL

[0364] In some embodiments, CD22 CARs comprise a sequence, for example, a CDR, VH, VL, scFv, or full-CAR sequence, disclosed in Tables 15-16 and Table 24 below, or a sequence having at least 70%, 75%, 80%, 85%, 90%, 95%, 96%, 97%, 98%, or 99% identity thereto.

TABLE 15
Heavy Chain Variable Domain CDRs
of CD22 CAR (CAR22-65)

| | | SEQ | | SEQ | | SEQ |
|---|---|---|---|---|---|---|
| | | ID | | ID | | ID |
| Candidate | HCDR1 | NO: | HCDR2 | NO: | HCDR3 | NO: |
| CAR22-65 | GDSML | 744 | RTYHR | 746 | VRLQD | 748 |
| Combined | SNSDT | | STWYD | | GNSWS | |
| | WN | | DYASS | | DAFDV | |
| | | | VRG | | | |
| CAR22-65 | SNSDT | 745 | RTYHR | 747 | VRLQD | 749 |
| Kabat | WN | | STWYD | | GNSWS | |
| | | | DYASS | | DAFDV | |
| | | | VRG | | | |
| CD22-65 | GDSML | 1180 | YHRST | 1181 | VRLQD | 1182 |
| Chothia | SNSD | | WY | | GNSWS | |
| | | | | | DAFDV | |
| CD22-65 | GDSML | 1183 | TYHRS | 1184 | ARVRL | 1185 |
| IMGT | SNSDT | | TWYD | | QDGNS | |
| | | | | | WSDAF | |
| | | | | | DV | |

TABLE 16
Light Chain Variable Domain CDRs
of CD22 CAR (CAR22-65).
The LC CDR sequences in this
table have the same sequence
under the Kabat or combined
definitions.

| | | SEQ | | SEQ | | SEQ |
|---|---|---|---|---|---|---|
| | | ID | | ID | | ID |
| Candidate | LCDR1 | NO: | LCDR2 | NO: | LCDR3 | NO: |
| CAR22-65 | TGTSS | 750 | DVSNR | 751 | SSYTS | 752 |
| Combined | DVGGY | | PS | | SSTLY | |
| | NYVS | | | | V | |
| CD22-65 | TGTSS | 1186 | DVSNR | 1189 | SSYTS | 1192 |
| Kabat | DVGGY | | PS | | SSTLY | |
| | NYVS | | | | V | |
| CD22-65 | TSSDV | 1187 | DVS | 1190 | YTSSS | 1193 |
| Chothia | GGYNY | | | | TLY | |
| CD22-65 | SSDVG | 1188 | DVS | 1191 | SSYTS | 1194 |
| IMGT | GYNY | | | | SSTLY | |
| | | | | | V | |

Table 24
Amino acid sequences of exemplary
anti-CD22 molecules

| SEQ ID | | |
|---|---|---|
| NO: | Region | Sequence |
| CD22-65s | | |
| 1195 | scFv (VH- | EVQLQQSGPGLVKPSQTLSLTCAISGDSML |
| | linker-VL) | SNSDTWNWIRQSPSRGLEWLGRTYHRSTWY |
| | (linker | DDYASSVRGRVSINVDTSKNQYSLQLNAVT |
| | shown by | PEDTGVYYCARVRLQDGNSWSDAFDVWGQG |
| | italics and | TMVTVSSGGGGSQSALTQPASASGSPGQSV |
| | underline) | TISCTGTSSDVGGYNYVSWYQQHPGKAPKL |
| | | MIYDVSNRPSGVSNRFSGSKSGNTASLTIS |
| | | GLQAEDEADYYCSSYTSSSTLYVFGTGTQL |
| | | TVL |
| CD22-65ss | | |
| 1196 | scFv (VH- | EVQLQQSGPGLVKPSQTLSLTCAISGDSML |
| | VL) | SNSDTWNWIRQSPSRGLEWLGRTYHRSTWY |
| | (no linker | DDYASSVRGRVSINVDTSKNQYSLQLNAVT |
| | between | PEDTGVYYCARVRLQDGNSWSDAFDVWGQG |
| | VH-VL) | TMVTVSSQSALTQPASASGSPGQSVTISCT |
| | | GTSSDVGGYNYVSWYQQHPGKAPKLMIYDV |
| | | SNRPSGVSNRFSGSKSGNTASLTISGLQAE |
| | | DEADYYCSSYTSSSTLYVFGTGTQLTVL |
| CD22-65sKD | | |
| 1197 | VH | EVQLQQSGPGLVKPSQTLSLTCAISGDSML |
| | | SNSDTWNWIRKSPSRGLEWLGRTYHRSTWY |
| | | DDYASSVRGRVSINVDTSKNQYSLQLNAVT |
| | | PEDTGVYYCARVRLQDGNSWSDAFDVWGQG |
| | | TMVTVSS |
| 1198 | VL | QSALTQPASASGSPGQSVTISCTGTSSDVG |
| | | GYNYVSWYQDHPGKAPKLMIYDVSNRPSGV |
| | | SNRFSGSKSGNTASLTISGLQAEDEADYYC |
| | | SSYTSSSTLYVFGTGTQLTVL |
| 1199 | scFv (VH- | EVQLQQSGPGLVKPSQTLSLTCAISGDSML |
| | linker-VL) | SNSDTWNWIRKSPSRGLEWLGRTYHRSTWY |
| | | DDYASSVRGRVSINVDTSKNQYSLQLNAVT |
| | | PEDTGVYYCARVRLQDGNSWSDAFDVWGQG |
| | | TMVTVSSGGGGSQSALTQPASASGSPGQSV |
| | | TISCTGTSSDVGGYNYVSWYQDHPGKAPKL |
| | | MIYDVSNRPSGVSNRFSGSKSGNTASLTIS |
| | | GLQAEDEADYYCSSYTSSSTLYVFGTGTQL |
| | | TVL |
| CD22-64 | | |
| 1200 | HC CDR1 | SNSDTWN |
| | (Kabat) | |
| 1201 | HC CDR2 | RTYHRSTWYDDYASSVRG |
| | (Kabat) | |
| 1202 | HC CDR3 | VRLQDGNSWSDAFDV |
| | (Kabat) | |
| 1203 | HC CDR1 | GDSVLSNSD |
| | (Chothia) | |
| 1204 | HC CDR2 | YHRSTWY |
| | (Chothia) | |
| 1205 | HC CDR3 | VRLQDGNSWSDAFDV |
| | (Chothia) | |
| 1206 | HC CDR1 | GDSVLSNSDT |
| | (IMGT) | |
| 1207 | HC CDR2 | TYHRSTWYD |
| | (IMGT) | |
| 1208 | HC CDR3 | ARVRLQDGNSWSDAFDV |
| | (IMGT) | |
| 1209 | HC CDR1 | GDSVLSNSDTWN |
| | (Combined) | |
| 1210 | HC CDR2 | RTYHRSTWYDDYASSVRG |
| | (Combined) | |
| 1211 | HC CDR3 | VRLQDGNSWSDAFDV |
| | (Combined) | |
| 1212 | VH | EVQLQQSGPGLVKPSQTLPLTCAISGDSVL |
| | | SNSDTWNWIRQSPSRGLEWLGRTYHRSTWY |
| | | DDYASSVRGRVSINVDTSKNQYSLQLNAVT |
| | | PEDTGVYYCARVRLQDGNSWSDAFDVWGQG |
| | | TMVTVSS |
| 1213 | LC CDR1 | TGTSSDVGGYNYVS |
| | (Kabat) | |
| 1214 | LC CDR2 | DVSNRPS |
| | (Kabat) | |
| 1215 | LC CDR3 | SSYTSSSTLYV |
| | (Kabat) | |
| 1216 | LC CDR1 | TSSDVGGYNY |
| | (Chothia) | |
| 1217 | LC CDR2 | DVS |
| | (Chothia) | |
| 1218 | LC CDR3 | YTSSSTLY |
| | (Chothia) | |
| 1219 | LC CDR1 | SSDVGGYNY |
| | (IMGT) | |
| 1220 | LC CDR2 | DVS |
| | (IMGT) | |
| 1221 | LC CDR3 | SSYTSSSTLYV |
| | (IMGT) | |
| 1222 | LC CDR1 | TGTSSDVGGYNYVS |
| | (Combined) | |
| 1223 | LC CDR2 | DVSNRPS |
| | (Combined) | |
| 1224 | LC CDR3 | SSYTSSSTLYV |
| | (Combined) | |
| 1225 | VL | QSALTQPASASGSPGQSVTISCTGTSSDVG |
| | | GYNYVSWYQQHPGKAPKLMIYDVSNRPSGV |
| | | SNRFSGSKSGNTASLTISGLQAEDEADYYC |
| | | SSYTSSSTLYVFGTGTQLTVL |
| 1226 | scFv (VH- | EVQLQQSGPGLVKPSQTLPLTCAISGDSVL |
| | linker-VL) | SNSDTWNWIRQSPSRGLEWLGRTYHRSTWY |
| | | DDYASSVRGRVSINVDTSKNQYSLQLNAVT |
| | | PEDTGVYYCARVRLQDGNSWSDAFDVWGQG |
| | | TMVTVSSGGGGSGGGGSGGGGPQSALTQPA |
| | | SASGSPGQSVTISCTGTSSDVGGYNYVSWY |
| | | QQHPGKAPKLMIYDVSNRPSGVSNRFSGSK |
| | | SGNTASLTISGLQAEDEADYYCSSYTSSST |
| | | LYVFGTGTQLTVL |
| CD22-57 | | |
| 1227 | HC CDR1 | NNNAAWN |
| | (Kabat) | |
| 1228 | HC CDR2 | RTYHRSTWYNDYVGSVKS |
| | (Kabat) | |
| 1229 | HC CDR3 | ETDYGDYGAFDI |
| | (Kabat) | |
| 1230 | HC CDR1 | GDSVSNNNA |
| | (Chothia) | |
| 1231 | HC CDR2 | YHRSTWY |
| | (Chothia) | |
| 1232 | HC CDR3 | ETDYGDYGAFDI |
| | (Chothia) | |
| 1233 | HC CDR1 | GDSVSNNNAA |
| | (IMGT) | |
| 1234 | HC CDR2 | TYHRSTWYN |
| | (IMGT) | |
| 1235 | HC CDR3 | ARETDYGDYGAFDI |
| | (IMGT) | |
| 1236 | HC CDR1 | GDSVSNNNAAWN |
| | (Combined) | |
| 1237 | HC CDR2 | RTYHRSTWYNDYVGSVKS |
| | (Combined) | |
| 1238 | HC CDR3 | ETDYGDYGAFDI |
| | (Combined) | |
| 1239 | VH | EVQLQQSGPGLVKPSQTLSLTCAISGDSVS |
| | | NNNAAWNWIRQSPSRGLEWLGRTYHRSTWY |
| | | NDYVGSVKSRITINPDTSKNQFSLQLNSVT |
| | | PEDTAVYYCARETDYGDYGAFDIWGQGTTV |
| | | TVSS |
| 1240 | LC CDR1 | TGSRNDIGAYESVS |
| | (Kabat) | |
| 1241 | LC CDR2 | GVNNRPS |
| | (Kabat) | |
| 1242 | LC CDR3 | SSHTTTSTLYV |
| | (Kabat) | |
| 1243 | LC CDR1 | SRNDIGAYES |
| | (Chothia) | |
| 1244 | LC CDR2 | GVN |
| | (Chothia) | |
| 1245 | LC CDR3 | HTTTSTLY |
| | (Chothia) | |
| 1246 | LC CDR1 | RNDIGAYES |
| | (IMGT) | |
| 1247 | LC CDR2 | GVN |
| | (IMGT) | |
| 1248 | LC CDR3 | SSHTTTSTLYV |
| | (IMGT) | |
| 1249 | LC CDR1 | TGSRNDIGAYESVS |
| | (Combined) | |
| 1250 | LC CDR2 | GVNNRPS |
| | (Combined) | |
| 1251 | LC CDR3 | SSHTTTSTLYV |
| | (Combined) | |
| 1252 | VL | QSALTQPASVSGSPGQSITISCTGSRNDIG |
| | | AYESVSWYQQHPGNAPKLIIHGVNNRPSGV |
| | | FDRFSVSQSGNTASLTISGLQAEDEADYYC |
| | | SSHTTTSTLYVFGTGTKVTVL |
| 1253 | scFv (VH- | EVQLQQSGPGLVKPSQTLSLTCAISGDSVS |
| | linker-VL) | NNNAAWNWIRQSPSRGLEWLGRTYHRSTWY |
| | | NDYVGSVKSRITINPDTSKNQFSLQLNSVT |
| | | PEDTAVYYCARETDYGDYGAFDIWGQGTTV |
| | | TVSSGGGGSGGGGSGGGGSQSALTQPASVS |
| | | GSPGQSITISCTGSRNDIGAYESVSWYQQH |
| | | PGNAPKLIIHGVNNRPSGVFDRFSVSQSGN |
| | | TASLTISGLQAEDEADYYCSSHTTTSTLYV |
| | | FGTGTKVTVL |
| CD22-58 | | |
| 1254 | HC CDR1 | SNSAAWN |
| | (Kabat) | |
| 1255 | HC CDR2 | RTFYRSKWYNDYAVSVKG |
| | (Kabat) | |
| 1256 | HC CDR3 | GDYYYGLDV |
| | (Kabat) | |
| 1257 | HC CDR1 | GDSVSSNSA |
| | (Chothia) | |
| 1258 | HC CDR2 | FYRSKWY |
| | (Chothia) | |
| 1259 | HC CDR3 | GDYYYGLDV |
| | (Chothia) | |
| 1260 | HC CDR1 | GDSVSSNSAA |
| | (IMGT) | |
| 1261 | HC CDR2 | TFYRSKWYN |
| | (IMGT) | |
| 1262 | HC CDR3 | AGGDYYYGLDV |
| | (IMGT) | |
| 1263 | HC CDR1 | GDSVSSNSAAWN |
| | (Combined) | |
| 1264 | HC CDR2 | RTFYRSKWYNDYAVSVKG |
| | (Combined) | |
| 1265 | HC CDR3 | GDYYYGLDV |
| | (Combined) | |
| 1266 | VH | EVQLQQSGPGLVNPSQTLSITCAISGDSVS |
| | | SNSAAWNWIRQSPSRGLEWLGRTFYRSKWY |
| | | NDYAVSVKGRITISPDTSKNQFSLQLNSVT |
| | | PEDTAVYYCAGGDYYYGLDVWGQGTTVTVS |
| | | S |
| 1267 | LC CDR1 | TGSSSDVGGYNSVS |
| | (Kabat) | |
| 1268 | LC CDR2 | EVINRPS |
| | (Kabat) | |
| 1269 | LC CDR3 | SSYTSSSTYV |
| | (Kabat) | |
| 1270 | LC CDR1 | SSSDVGGYNS |
| | (Chothia) | |
| 1271 | LC CDR2 | EVI |
| | (Chothia) | |
| 1272 | LC CDR3 | YTSSSTY |
| | (Chothia) | |
| 1273 | LC CDR1 | SSDVGGYNS |
| | (IMGT) | |
| 1274 | LC CDR2 | EVI |
| | (IMGT) | |
| 1275 | LC CDR3 | SSYTSSSTYV |
| | (IMGT) | |
| 1276 | LC CDR1 | TGSSSDVGGYNSVS |
| | (Combined) | |
| 1277 | LC CDR2 | EVINRPS |
| | (Combined) | |
| 1278 | LC CDR3 | SSYTSSSTYV |
| | (Combined) | |
| 1279 | VL | QSALTQPASVSGSPGQSITISCTGSSSDVG |
| | | GYNSVSWYQQHPGKAPKLMIYEVINRPSGV |
| | | SHRFSGSKSGNTASLTISGLQAEDEADYYC |
| | | SSYTSSSTYVFGTGTKVTVL |
| 1280 | scFv (VH- | EVQLQQSGPGLVNPSQTLSITCAISGDSVS |
| | linker-VL) | SNSAAWNWIRQSPSRGLEWLGRTFYRSKWY |
| | | NDYAVSVKGRITISPDTSKNQFSLQLNSVT |
| | | PEDTAVYYCAGGDYYYGLDVWGQGTTVTVS |
| | | SGGGGSGGGGSGGGGSQSALTQPASVSGSP |
| | | GQSITISCTGSSSDVGGYNSVSWYQQHPGK |
| | | APKLMIYEVINRPSGVSHRFSGSKSGNTAS |
| | | LTISGLQAEDEADYYCSSYTSSSTYVFGTG |
| | | TKVTVL |
| CD22-59 | | |
| 1281 | HC CDR1 | SNSDTWN |
| | (Kabat) | |
| 1282 | HC CDR2 | RTYHRSTWYDDYASSVRG |
| | (Kabat) | |
| 1283 | HC CDR3 | DRLQDGNSWSDAFDV |
| | (Kabat) | |
| 1284 | HC CDR1 | GDSVLSNSD |
| | (Chothia) | |
| 1285 | HC CDR2 | YHRSTWY |
| | (Chothia) | |
| 1286 | HC CDR3 | DRLQDGNSWSDAFDV |
| | (Chothia) | |
| 1287 | HC CDR1 | GDSVLSNSDT |
| | (IMGT) | |
| 1288 | HC CDR2 | TYHRSTWYD |
| | (IMGT) | |
| 1289 | HC CDR3 | ARDRLQDGNSWSDAFDV |
| | (IMGT) | |
| 1290 | HC CDR1 | GDSVLSNSDTWN |
| | (Combined) | |
| 1291 | HC CDR2 | RTYHRSTWYDDYASSVRG |
| | (Combined) | |
| 1292 | HC CDR3 | DRLQDGNSWSDAFDV |
| | (Combined) | |
| 1293 | VH | EVQLQQSGPGLVKPSQTLSLTCAISGDSVL |
| | | SNSDTWNWIRQSPSRGLEWLGRTYHRSTWY |
| | | DDYASSVRGRVSINVDTSKNQYSLQLNAVT |
| | | PEDTGVYYCARDRLQDGNSWSDAFDVWGQG |
| | | TMVTVSS |
| 1294 | LC CDR1 | TGSSSDIGGFNYVS |
| | (Kabat) | |
| 1295 | LC CDR2 | EVTNRPS |
| | (Kabat) | |
| 1296 | LC CDR3 | SSYASGSPLYV |
| | (Kabat) | |
| 1297 | LC CDR1 | SSSDIGGFNY |
| | (Chothia) | |
| 1298 | LC CDR2 | EVT |
| | (Chothia) | |
| 1299 | LC CDR3 | YASGSPLY |
| | (Chothia) | |
| 1300 | LC CDR1 | SSDIGGFNY |
| | (IMGT) | |
| 1301 | LC CDR2 | EVT |
| | (IMGT) | |
| 1302 | LC CDR3 | SSYASGSPLYV |
| | (IMGT) | |
| 1303 | LC CDR1 | TGSSSDIGGFNYVS |
| | (Combined) | |
| 1304 | LC CDR2 | EVTNRPS |
| | (Combined) | |
| 1305 | LC CDR3 | SSYASGSPLYV |
| | (Combined) | |
| 1306 | VL | QSALTQPASVSGSPGQSITISCTGSSSDIG |
| | | GFNYVSWYQQHAGEAPKLMIYEVTNRPSGV |
| | | SDRFSGSKSDNTASLTISGLQAEDEADYYC |
| | | SSYASGSPLYVFGTGTKVTVL |
| 1307 | scFv (VH- | EVQLQQSGPGLVKPSQTLSLTCAISGDSVL |
| | linker-VL) | SNSDTWNWIRQSPSRGLEWLGRTYHRSTWY |
| | | DDYASSVRGRVSINVDTSKNQ |
| | | YSLQLNAVTPEDTGVYYCARDRLQDGNSWS |
| | | DAFDVWGQGTMVTVSSGGGGSGGGGSGGGG |
| | | SQSALTQPASVSGSPGQSITISCTGSSSDI |
| | | GGFNYVSWYQQHAGEAPKLMIYEVTNRPSG |
| | | VSDRFSGSKSDNTASLTISGLQAEDEADYY |
| | | CSSYASGSPLYVFGTGTKVTVL |
| CD22-60 | | |
| 1308 | HC CDR1 | SNSDTWN |
| | (Kabat) | |
| 1309 | HC CDR2 | RTYHRSTWYDDYASSVRG |
| | (Kabat) | |
| 1310 | HC CDR3 | DRLQDGNSWSDAFDV |
| | (Kabat) | |
| 1311 | HC CDR1 | GDSVLSNSD |
| | (Chothia) | |
| 1312 | HC CDR2 | YHRSTWY |
| | (Chothia) | |
| 1313 | HC CDR3 | DRLQDGNSWSDAFDV |
| | (Chothia) | |
| 1314 | HC CDR1 | GDSVLSNSDT |
| | (IMGT) | |
| 1315 | HC CDR2 | TYHRSTWYD |
| | (IMGT) | |
| 1316 | HC CDR3 | ARDRLQDGNSWSDAFDV |
| | (IMGT) | |
| 1317 | HC CDR1 | GDSVLSNSDTWN |
| | (Combined) | |
| 1318 | HC CDR2 | RTYHRSTWYDDYASSVRG |
| | (Combined) | |
| 1319 | HC CDR3 | DRLQDGNSWSDAFDV |
| | (Combined) | |
| 1320 | VH | EVQLQQSGPGLVKPSQTLSLTCAISGDSVL |
| | | SNSDTWNWIRQSPSRGLEWLGRTYHRSTWY |
| | | DDYASSVRGRVSINVDTSKNQYSLQLNAVT |
| | | PEDTGVYYCARDRLQDGNSWSDAFDVWGQG |
| | | TMVTVSS |
| 1321 | LC CDR1 | TGTSSDIGGYNYVS |
| | (Kabat) | |
| 1322 | LC CDR2 | EVSNRPS |
| | (Kabat) | |
| 1323 | LC CDR3 | SSYTSSSTLYV |
| | (Kabat) | |
| 1324 | LC CDR1 | TSSDIGGYNY |
| | (Chothia) | |
| 1325 | LC CDR2 | EVS |
| | (Chothia) | |
| 1326 | LC CDR3 | YTSSSTLY |
| | (Chothia) | |
| 1327 | LC CDR1 | SSDIGGYNY |
| | (IMGT) | |
| 1328 | LC CDR2 | EVS |
| | (IMGT) | |
| 1329 | LC CDR3 | SSYTSSSTLYV |
| | (IMGT) | |
| 1330 | LC CDR1 | TGTSSDIGGYNYVS |
| | (Combined) | |
| 1331 | LC CDR2 | EVSNRPS |
| | (Combined) | |
| 1332 | LC CDR3 | SSYTSSSTLYV |
| | (Combined) | |
| 1333 | VL | QSALTQPASVSGSPGQSITFSCTGTSSDIG |
| | | GYNYVSWYQQHPGKAPKLMIYEVSNRPSGV |
| | | SNRFSGTKSGNTASLTISGLQAEDEADYYC |
| | | SSYTSSSTLYVFGTGTKLTVL |
| 1334 | scFv (VH- | EVQLQQSGPGLVKPSQTLSLTCAISGDSVL |
| | linker-VL) | SNSDTWNWIRQSPSRGLEWLGRTYHRSTWY |
| | | DDYASSVRGRVSINVDTSKNQYSLQLNAVT |
| | | PEDTGVYYCARDRLQDGNSWSDAFDVWGQG |
| | | TMVTVSSGGGGSGGGGSGSGGSQSALTQPA |
| | | SVSGSPGQSITFSCTGTSSDIGGYNYVSWY |
| | | QQHPGKAPKLMIYEVSNRPSGVSNRFSGTK |
| | | SGNTASLTISGLQAEDEADYYCSSYTSSST |
| | | LYVFGTGTKLTVL |
| CD22-61 | | |
| 1335 | HC CDR1 | SNSDTWN |
| | (Kabat) | |
| 1336 | HC CDR2 | RTYHRSTWYDDYASSVRG |
| | (Kabat) | |
| 1337 | HC CDR3 | DRLQDGNSWSDAFDV |
| | (Kabat) | |
| 1338 | HC CDR1 | GDSVLSNSD |
| | (Chothia) | |
| 1339 | HC CDR2 | YHRSTWY |
| | (Chothia) | |
| 1340 | HC CDR3 | DRLQDGNSWSDAFDV |
| | (Chothia) | |
| 1341 | HC CDR1 | GDSVLSNSDT |
| | (IMGT) | |
| 1342 | HC CDR2 | TYHRSTWYD |
| | (IMGT) | |
| 1343 | HC CDR3 | ARDRLQDGNSWSDAFDV |
| | (IMGT) | |
| 1344 | HC CDR1 | GDSVLSNSDTWN |
| | (Combined) | |
| 1345 | HC CDR2 | RTYHRSTWYDDYASSVRG |
| | (Combined) | |
| 1346 | HC CDR3 | DRLQDGNSWSDAFDV |
| | (Combined) | |
| 1347 | VH | QVQLQESGPGLVKPSQTLSLTCAISGDSVL |
| | | SNSDTWNWIRQSPSRGLEWLGRTYHRSTWY |
| | | DDYASSVRGRVSINVDTSKNQYSLQLNAVT |
| | | PEDTGVYYCARDRLQDGNSWSDAFDVWGQG |
| | | TMVTVSS |
| 1348 | LC CDR1 | TGTSSDVGGYNYVS |
| | (Kabat) | |
| 1349 | LC CDR2 | EVSNRPS |
| | (Kabat) | |
| 1350 | LC CDR3 | SSYTSSSTLYV |
| | (Kabat) | |
| 1351 | LC CDR1 | TSSDVGGYNY |
| | (Chothia) | |
| 1352 | LC CDR2 | EVS |
| | (Chothia) | |
| 1353 | LC CDR3 | YTSSSTLY |
| | (Chothia) | |
| 1354 | LC CDR1 | SSDVGGYNY |
| | (IMGT) | |
| 1355 | LC CDR2 | EVS |
| | (IMGT) | |
| 1356 | LC CDR3 | SSYTSSSTLYV |
| | (IMGT) | |
| 1357 | LC CDR1 | TGTSSDVGGYNYVS |
| | (Combined) | |
| 1358 | LC CDR2 | EVSNRPS |
| | (Combined) | |
| 1359 | LC CDR3 | SSYTSSSTLYV |
| | (Combined) | |
| 1360 | VL | QSALTQPASVSGSPGQSITISCTGTSSDVG |
| | | GYNYVSWYQQHPGKAPKLMIYEVSNRPSGV |
| | | SNRFSGSKSGNTASLTISGLQAEDEADYYC |
| | | SSYTSSSTLYVFGTGTKVTVL |
| 1361 | scFv (VH- | QVQLQESGPGLVKPSQTLSLTCAISGDSVL |
| | linker-VL) | SNSDTWNWIRQSPSRGLEWLGRTYHRSTWY |
| | | DDYASSVRGRVSINVDTSKNQYSLQLNAVT |
| | | PEDTGVYYCARDRLQDGNSWSDAFDVWGQG |
| | | TMVTVSSGGGGSGGGGSGSGGSQSALTQPA |
| | | SVSGSPGQSITISCTGTSSDVGGYNYVSWY |
| | | QQHPGKAPKLMIYEVSNRPSGVSNRFSGSK |
| | | SGNTASLTISGLQAEDEADYYCSSYTSSST |
| | | LYVFGTGTKVTVL |
| CD22-62 | | |
| 1362 | HC CDR1 | SNSDTWN |
| | (Kabat) | |
| 1363 | HC CDR2 | RTYHRSTWYDDYASSVRG |
| | (Kabat) | |
| 1364 | HC CDR3 | DRLQDGNSWSDAFDV |
| | (Kabat) | |
| 1365 | HC CDR1 | GDSVLSNSD |
| | (Chothia) | |
| 1366 | HC CDR2 | YHRSTWY |
| | (Chothia) | |
| 1367 | HC CDR3 | DRLQDGNSWSDAFDV |
| | (Chothia) | |
| 1368 | HC CDR1 | GDSVLSNSDT |
| | (IMGT) | |
| 1369 | HC CDR2 | TYHRSTWYD |
| | (IMGT) | |
| 1370 | HC CDR3 | ARDRLQDGNSWSDAFDV |
| | (IMGT) | |
| 1371 | HC CDR1 | GDSVLSNSDTWN |
| | (Combined) | |
| 1372 | HC CDR2 | RTYHRSTWYDDYASSVRG |
| | (Combined) | |
| 1373 | HC CDR3 | DRLQDGNSWSDAFDV |
| | (Combined) | |
| 1374 | VH | EVQLQQSGPGLVKPSQTLSLTCAISGDSVL |
| | | SNSDTWNWIRQSPSRGLEWLGRTYHRSTWY |
| | | DDYASSVRGRVSINVDTSKNQYSLQLNAVT |
| | | PEDTGVYYCARDRLQDGNSWSDAFDVWGQG |
| | | TMVTVSS |
| 1375 | LC CDR1 | TGTSSDVGGYNYVS |
| | (Kabat) | |
| 1376 | LC CDR2 | DVSNRPS |
| | (Kabat) | |
| 1377 | LC CDR3 | SSYTSSSTLYV |
| | (Kabat) | |
| 1378 | LC CDR1 | TSSDVGGYNY |
| | (Chothia) | |
| 1379 | LC CDR2 | DVS |
| | (Chothia) | |
| 1380 | LC CDR3 | YTSSSTLY |
| | (Chothia) | |
| 1381 | LC CDR1 | SSDVGGYNY |
| | (IMGT) | |
| 1382 | LC CDR2 | DVS |
| | (IMGT) | |
| 1383 | LC CDR3 | SSYTSSSTLYV |
| | (IMGT) | |
| 1384 | LC CDR1 | TGTSSDVGGYNYVS |
| | (Combined) | |
| 1385 | LC CDR2 | DVSNRPS |
| | (Combined) | |
| 1386 | LC CDR3 | SSYTSSSTLYV |
| | (Combined) | |
| 1387 | VL | QSALTQPASVSGSPGQSITISCTGTSSDVG |
| | | GYNYVSWYQQHPGKAPKLMIYDVSNRPSGV |
| | | SNRFSGSKSGNTASLTISGLQAEDEADYYC |
| | | SSYTSSSTLYVFGTGTKVTVL |
| 1388 | scFv (VH- | EVQLQQSGPGLVKPSQTLSLTCAISGDSVL |
| | linker-VL) | SNSDTWNWIRQSPSRGLEWLGRTYHRSTWY |
| | | DDYASSVRGRVSINVDTSKNQYSLQLNAVT |
| | | PEDTGVYYCARDRLQDGNSWSDAFDVWGQG |
| | | TMVTVSSGGGGSGGGGSGGGGSQSALTQPA |
| | | SVSGSPGQSITISCTGTSSDVGGYNYVSWY |
| | | QQHPGKAPKLMIYDVSNRPSGVSNRFSGSK |
| | | SGNTASLTISGLQAEDEADYYCSSYTSSST |
| | | LYVFGTGTKVTVL |
| CD22-63 | | |
| 1389 | HC CDR1 | SNSDTWN |
| | (Kabat) | |
| 1390 | HC CDR2 | RTYHRSTWYDDYASSVRG |
| | (Kabat) | |
| 1391 | HC CDR3 | DRLQDGNSWSDAFDV |
| | (Kabat) | |
| 1392 | HC CDR1 | GDSVLSNSD |
| | (Chothia) | |
| 1393 | HC CDR2 | YHRSTWY |
| | (Chothia) | |
| 1394 | HC CDR3 | DRLQDGNSWSDAFDV |
| | (Chothia) | |
| 1395 | HC CDR1 | GDSVLSNSDT |
| | (IMGT) | |
| 1396 | HC CDR2 | TYHRSTWYD |
| | (IMGT) | |
| 1397 | HC CDR3 | ARDRLQDGNSWSDAFDV |
| | (IMGT) | |
| 1398 | HC CDR1 | GDSVLSNSDTWN |
| | (Combined) | |
| 1399 | HC CDR2 | RTYHRSTWYDDYASSVRG |
| | (Combined) | |
| 1400 | HC CDR3 | DRLQDGNSWSDAFDV |
| | (Combined) | |
| 1401 | VH | EVQLQQSGPGLVKPSQTLSLTCAISGDSVL |
| | | SNSDTWNWIRQSPSRGLEWLGRTYHRSTWY |
| | | DDYASSVRGRVSINVDTSKNQYSLQLNAVT |
| | | PEDTGVYYCARDRLQDGNSWSDAFDVWGQG |
| | | TMVTVSS |
| 1402 | LC CDR1 | TGTSSDVGGYNYVS |
| | (Kabat) | |
| 1403 | LC CDR2 | EVSNRPS |
| | (Kabat) | |
| 1404 | LC CDR3 | SSYTSSSTLYI |
| | (Kabat) | |
| 1405 | LC CDR1 | TSSDVGGYNY |
| | (Chothia) | |
| 1406 | LC CDR2 | EVS |
| | (Chothia) | |
| 1407 | LC CDR3 | YTSSSTLY |
| | (Chothia) | |
| 1408 | LC CDR1 | SSDVGGYNY |
| | (IMGT) | |
| 1409 | LC CDR2 | EVS |
| | (IMGT) | |
| 1410 | LC CDR3 | SSYTSSSTLYI |
| | (IMGT) | |
| 1411 | LC CDR1 | TGTSSDVGGYNYVS |
| | (Combined) | |
| 1412 | LC CDR2 | EVSNRPS |
| | (Combined) | |
| 1413 | LC CDR3 | SSYTSSSTLYI |
| | (Combined) | |
| 1414 | VL | QSALTQPASVSGSPGQSITISCTGTSSDVG |
| | | GYNYVSWYQQHPGKAPKLMIYEVSNRPSGV |
| | | SNRFSGSKSGNTASLTISGLQAEDEADYYC |
| | | SSYTSSSTLYIFGTGTKVTVL |
| 1415 | scFv (VH- | EVQLQQSGPGLVKPSQTLSLTCAISGDSVL |
| | linker-VL) | SNSDTWNWIRQSPSRGLEWLGRTYHRSTWY |
| | | DDYASSVRGRVSINVDTSKNQYSLQLNAVT |
| | | PEDTGVYYCARDRLQDGNSWSDAFDVWGQG |
| | | TMVTVSSGGGGGGGGSGGGGSQSALTQPAS |
| | | VSGSPGQSITISCTGTSSDVGGYNYVSWYQ |
| | | QHPGKAPKLMIYEVSNRPSGVSNRFSGSKS |
| | | GNTASLTISGLQAEDEADYYCSSYTSSSTL |
| | | YIFGTGTKVTVL |

[0365] CARs that bind to EGFR are known in the art. For example, those disclosed in WO2014/130657, incorporated by reference herein, can be used in accordance with the present disclosure. Any known EGFR CAR, for example, the EGFR antigen binding domain of any known EGFR CAR, in the art can be used in accordance with the present disclosure. Exemplary EGFRvIII CARs can include a CDR, a variable region, an scFv, or a full-length CAR sequence disclosed in WO2014/130657, for example, Table 2 of WO2014/130657, incorporated herein by reference.

[0366] CARs that bind to CD123 are known in the art. For example, those disclosed in WO2014/130635 or WO2016/028896 can be used in accordance with the present disclosure. Any known CD123 CAR, for example, the CD123 antigen binding domain of any known CD123 CAR, in the art can be used in accordance with the present disclosure. For example, CAR1 to CAR8 disclosed in WO2014/130635; or CAR123-1 to CAR123-4 and hzCAR123-1 to hzCAR123-32, disclosed in WO2016/028896. The amino acid and nucleotide sequences encoding the CD123 CAR molecules and antigen binding domains (for example, including one, two, three VH CDRs; and one, two, three VL CDRs according to Kabat or Chothia), are specified in WO 2014/130635 and WO2016/028896. CARs that bind to CLL-1 are known in the art. For example, those disclosed in US2016/0051651A1, incorporated herein by reference. Any known CLL-1 CAR, for example, the CLL-1 antigen binding domain of any known CLL-1 CAR, in the art can be used in accordance with the present disclosure.

[0367] In some embodiments, the CAR comprises a CLL-1 CAR or antigen binding domain according to Table 2 of WO2016/014535, incorporated herein by reference. The amino acid and nucleotide sequences encoding the CLL-1 CAR molecules and antigen binding domains (for example, including one, two, three VH CDRs; and one, two, three VL CDRs according to Kabat or Chothia), are specified in WO2016/014535.

[0368] CARs that bind to CD33 are known in the art. For example, those disclosed in US2016/0096892A1 and WO2016/014576, incorporated by reference herein, can be used in accordance with the present disclosure. Any known CD33 CAR, for example, the CD33 antigen binding domain of any known CD33 CAR, in the art can be used in accordance with the present disclosure. For example, CAR33-1 to CAR33-9 disclosed in WO2016/014576 can be used in accordance with the present disclosure.

[0369] In some embodiments, the CAR comprises a CD33 CAR or antigen binding domain according to Table 2 or 9 of WO2016/014576, incorporated herein by reference. The amino acid and nucleotide sequences encoding the CD33 CAR molecules and antigen binding domains (for example, including one, two, three VH CDRs; and one, two, three VL CDRs according to Kabat or Chothia), are specified in WO2016/014576.

[0370] In one embodiment, an antigen binding domain against CD33 is an antigen binding portion, e.g., CDRs, of an antibody described in, e.g., Bross et al., Clin Cancer Res 7(6):1490-1496 (2001) (Gemtuzumab Ozogamicin, hP67.6), Caron et al., Cancer Res 52(24):6761-6767 (1992) (Lintuzumab, HuM195), Lapusan et al., Invest New Drugs 30(3):1121-1131 (2012) (AVE9633), Aigner et al., Leukemia 27(5): 1107-1115 (2013) (AMG330, CD33 BiTE), Dutour et al., Adv hematol 2012:683065 (2012), and Pizzitola et al., Leukemia doi:10.1038/Lue.2014.62 (2014). In one embodiment, an antigen binding domain against CD33 is an antigen binding portion, e.g., CDRs, of an antibody, antigen-binding fragment, or CAR described in WO/2016/014576.

[0371] In one embodiment, an antigen binding domain against GD2 is an antigen binding portion, e.g., CDRs, of an antibody described in, e.g., Mujoo et al., Cancer Res. 47(4):1098-1104 (1987); Cheung et al., Cancer Res 45(6):2642-2649 (1985), Cheung et al., J Clin Oncol 5(9):1430-1440 (1987), Cheung et al., J Clin Oncol 16(9):3053-3060 (1998), Handgretinger et al., Cancer Immunol Immunother 35(3):199-204 (1992). In some embodiments, an antigen binding domain against GD2 is an antigen binding portion of an antibody selected from mAb 14.18, 14G2a, ch14.18, hu14.18, 3F8, hu3F8, 3G6, 8B6, 60C3, 10B8, ME36.1, and 8H9, see e.g., WO2012033885, WO2013040371, WO2013192294, WO2013061273, WO2013123061, WO2013074916, and WO201385552. In some embodiments, an antigen binding domain against GD2 is an antigen binding portion of an antibody described in US Publication No.: 20100150910 or PCT Publication No.: WO 2011160119.

[0372] In one embodiment, an antigen binding domain against Tn antigen is an antigen binding portion, e.g., CDRs, of an antibody described in, e.g., U.S. Pat. No. 8,440,798, Brooks et al., PNAS 107(22):10056-10061 (2010), and Stone et al., OncoImmunology 1(6):863-873(2012).

[0373] In one embodiment, an antigen binding domain against PSMA is an antigen binding portion, e.g., CDRs, of an antibody described in, e.g., Parker et al., Protein Expr Purif 89(2):136-145 (2013), US 20110268656 (J591 ScFv); Frigerio et al, European J Cancer 49(9):2223-2232 (2013) (scFvD2B); WO 2006125481 (mAbs 3/A12, 3/E7 and 3/F11) and single chain antibody fragments (scFv A5 and D7).

[0374] In one embodiment, an antigen binding domain against ROR1 is an antigen binding portion, e.g., CDRs, of an antibody described in, e.g., Hudecek et al., Clin Cancer Res 19(12):3153-3164 (2013); WO 2011159847; and US20130101607.

[0375] In one embodiment, an antigen binding domain against FLT3 is an antigen binding portion, e.g., CDRs, of an antibody described in, e.g., WO2011076922, U.S. Pat. No. 5,777,084, EP0754230, US20090297529, and several commercial catalog antibodies (R&D, ebiosciences, Abcam).

[0376] In one embodiment, an antigen binding domain against TAG72 is an antigen binding portion, e.g., CDRs, of an antibody described in, e.g., Hombach et al., Gastroenterology 113(4):1163-1170 (1997); and Abcam ab691.

[0377] In one embodiment, an antigen binding domain against FAP is an antigen binding portion, e.g., CDRs, of an antibody described in, e.g., Ostermann et al., Clinical Cancer Research 14:4584-4592 (2008) (FAP5), US Pat. Publication No. 2009/0304718; sibrotuzumab (see e.g., Hofheinz et al., Oncology Research and Treatment 26(1), 2003); and Tran et al., J Exp Med 210(6):1125-1135 (2013).

[0378] In one embodiment, an antigen binding domain against CD38 is an antigen binding portion, e.g., CDRs, of daratumumab (see, e.g., Groen et al., Blood 116(21):1261-1262 (2010); MOR202 (see, e.g., U.S. Pat. No. 8,263,746); or antibodies described in U.S. Pat. No. 8,362,211.

[0379] In one embodiment, an antigen binding domain against CD44v6 is an antigen binding portion, e.g., CDRs, of an antibody described in, e.g., Casucci et al., Blood 122(20):3461-3472 (2013).

[0380] In one embodiment, an antigen binding domain against CEA is an antigen binding portion, e.g., CDRs, of an antibody described in, e.g., Chmielewski et al., Gastoenterology 143(4):1095-1107 (2012).

[0381] In one embodiment, an antigen binding domain against EPCAM is an antigen binding portion, e.g., CDRs, of an antibody selected from MT110, EpCAM-CD3 bispecific Ab (see, e.g., clinicaltrials.gov/ct2/show/NCT00635596); Edrecolomab; 3622W94; ING-1; and adecatumumab (MT201).

[0382] In one embodiment, an antigen binding domain against PRSS21 is an antigen binding portion, e.g., CDRs, of an antibody described in U.S. Pat. No. 8,080,650.

[0383] In one embodiment, an antigen binding domain against B7H3 is an antigen binding portion, e.g., CDRs, of an antibody MGA271 (Macrogenics).

[0384] In one embodiment, an antigen binding domain against KIT is an antigen binding portion, e.g., CDRs, of an antibody described in, e.g., U.S. Pat. No. 7,915,391, US20120288506, and several commercial catalog antibodies.

[0385] In one embodiment, an antigen binding domain against IL-13Ra2 is an antigen binding portion, e.g., CDRs, of an antibody described in, e.g., WO2008/146911, WO2004087758, several commercial catalog antibodies, and WO2004087758.

[0386] In one embodiment, an antigen binding domain against CD30 is an antigen binding portion, e.g., CDRs, of an antibody described in, e.g., U.S. Pat. No. 7,090,843 B1, and EP0805871.

[0387] In one embodiment, an antigen binding domain against GD3 is an antigen binding portion, e.g., CDRs, of an antibody described in, e.g., U.S. Pat. Nos. 7,253,263; 8,207,308; US 20120276046; EP1013761; WO2005035577; and U.S. Pat. No. 6,437,098.

[0388] In one embodiment, an antigen binding domain against CD171 is an antigen binding portion, e.g., CDRs, of an antibody described in, e.g., Hong et al., J Immunother 37(2):93-104 (2014).

[0389] In one embodiment, an antigen binding domain against IL-11Ra is an antigen binding portion, e.g., CDRs, of an antibody available from Abcam (cat #ab55262) or Novus Biologicals (cat #EPR5446). In another embodiment, an antigen binding domain again IL-11Ra is a peptide, see, e.g., Huang et al., Cancer Res 72(1):271-281 (2012).

[0390] In one embodiment, an antigen binding domain against PSCA is an antigen binding portion, e.g., CDRs, of an antibody described in, e.g., Morgenroth et al., Prostate 67(10):1121-1131 (2007) (scFv 7F5); Nejatollahi et al., J of Oncology 2013(2013), article ID 839831 (scFv C5-II); and US Pat Publication No. 20090311181.

[0391] In one embodiment, an antigen binding domain against VEGFR2 is an antigen binding portion, e.g., CDRs, of an antibody described in, e.g., Chinnasamy et al., J Clin Invest 120(11):3953-3968 (2010).

[0392] In one embodiment, an antigen binding domain against LewisY is an antigen binding portion, e.g., CDRs, of an antibody described in, e.g., Kelly et al., Cancer Biother Radiopharm 23(4):411-423 (2008) (hu3S193 Ab (scFvs)); Dolezal et al., Protein Engineering 16(1):47-56 (2003) (NC10 scFv).

[0393] In one embodiment, an antigen binding domain against CD24 is an antigen binding portion, e.g., CDRs, of an antibody described in, e.g., Maliar et al., Gastroenterology 143(5):1375-1384 (2012).

[0394] In one embodiment, an antigen binding domain against PDGFR-beta is an antigen binding portion, e.g., CDRs, of an antibody Abcam ab32570.

[0395] In one embodiment, an antigen binding domain against SSEA-4 is an antigen binding portion, e.g., CDRs, of antibody MC813 (Cell Signaling), or other commercially available antibodies.

[0396] In one embodiment, an antigen binding domain against CD20 is an antigen binding portion, e.g., CDRs, of the antibody Rituximab, Ofatumumab, Ocrelizumab, Veltuzumab, or GA101; or antibodies described in WO2016/164731.

[0397] In one embodiment, an antigen binding domain against Folate receptor alpha is an antigen binding portion, e.g., CDRs, of the antibody IMGN853, or an antibody described in US20120009181; U.S. Pat. No. 4,851,332, LK26: U.S. Pat. No. 5,952,484.

[0398] In one embodiment, an antigen binding domain against ERBB2 (Her2/neu) is an antigen binding portion, e.g., CDRs, of the antibody trastuzumab, or pertuzumab.

[0399] In one embodiment, an antigen binding domain against MUC1 is an antigen binding portion, e.g., CDRs, of the antibody SAR566658.

[0400] In one embodiment, the antigen binding domain against EGFR is antigen binding portion, e.g., CDRs, of the antibody cetuximab, panitumumab, zalutumumab, nimotuzumab, or matuzumab.

[0401] In one embodiment, an antigen binding domain against NCAM is an antigen binding portion, e.g., CDRs, of the antibody clone 2-2B: MAB5324 (EMD Millipore).

[0402] In one embodiment, an antigen binding domain against Ephrin B2 is an antigen binding portion, e.g., CDRs, of an antibody described in, e.g., Abengozar et al., Blood 119(19):4565-4576 (2012).

[0403] In one embodiment, an antigen binding domain against IGF-I receptor is an antigen binding portion, e.g., CDRs, of an antibody described in, e.g., U.S. Pat. No. 8,344,112 B2; EP2322550 A1; WO 2006/138315, or PCT/US2006/022995.

[0404] In one embodiment, an antigen binding domain against CAIX is an antigen binding portion, e.g., CDRs, of the antibody clone 303123 (R&D Systems).

[0405] In one embodiment, an antigen binding domain against LMP2 is an antigen binding portion, e.g., CDRs, of an antibody described in, e.g., U.S. Pat. No. 7,410,640, or US20050129701.

[0406] In one embodiment, an antigen binding domain against gp100 is an antigen binding portion, e.g., CDRs, of the antibody HMB45, NKIbetaB, or an antibody described in WO2013165940, or US20130295007

[0407] In one embodiment, an antigen binding domain against tyrosinase is an antigen binding portion, e.g., CDRs, of an antibody described in, e.g., U.S. Pat. No. 5,843,674; or US19950504048.

[0408] In one embodiment, an antigen binding domain against EphA2 is an antigen binding portion, e.g., CDRs, of an antibody described in, e.g., Yu et al., Mol Ther 22(1):102-111 (2014).

[0409] In one embodiment, an antigen binding domain against GD3 is an antigen binding portion, e.g., CDRs, of an antibody described in, e.g., U.S. Pat. Nos. 7,253,263; 8,207,308; US 20120276046; EP1013761 A3; 20120276046; WO2005035577; or U.S. Pat. No. 6,437,098.

[0410] In one embodiment, an antigen binding domain against fucosyl GM1 is an antigen binding portion, e.g., CDRs, of an antibody described in, e.g., US20100297138; or WO2007/067992.

[0411] In one embodiment, an antigen binding domain against sLe is an antigen binding portion, e.g., CDRs, of the antibody G193 (for lewis Y), see Scott A M et al, Cancer Res 60: 3254-61 (2000), also as described in Neeson et al, J Immunol May 2013 190 (Meeting Abstract Supplement) 177.10.

[0412] In one embodiment, an antigen binding domain against GM3 is an antigen binding portion, e.g., CDRs, of the antibody CA 2523449 (mAb 14F7).

[0413] In one embodiment, an antigen binding domain against HMWMAA is an antigen binding portion, e.g., CDRs, of an antibody described in, e.g., Kmiecik et al., Oncoimmunology 3(1):e27185 (2014) (PMID: 24575382) (mAb9.2.27); U.S. Pat. No. 6,528,481; WO2010033866; or US 20140004124.

[0414] In one embodiment, an antigen binding domain against o-acetyl-GD2 is an antigen binding portion, e.g., CDRs, of the antibody 8B6.

[0415] In one embodiment, an antigen binding domain against TEM1/CD248 is an antigen binding portion, e.g., CDRs, of an antibody described in, e.g., Marty et al., Cancer Lett 235(2):298-308 (2006); Zhao et al., J Immunol Methods 363(2):221-232 (2011).

[0416] In one embodiment, an antigen binding domain against CLDN6 is an antigen binding portion, e.g., CDRs, of the antibody IMAB027 (Ganymed Pharmaceuticals), see e.g., clinicaltrial.gov/show/NCT02054351.

[0417] In one embodiment, an antigen binding domain against TSHR is an antigen binding portion, e.g., CDRs, of an antibody described in, e.g., U.S. Pat. Nos. 8,603,466; 8,501,415; or U.S. Pat. No. 8,309,693.

[0418] In one embodiment, an antigen binding domain against GPRC5D is an antigen binding portion, e.g., CDRs, of the antibody FAB6300A (R&D Systems); or LS-A4180 (Lifespan Biosciences).

[0419] In one embodiment, an antigen binding domain against CD97 is an antigen binding portion, e.g., CDRs, of an antibody described in, e.g., U.S. Pat. No. 6,846,911; de Groot et al., J Immunol 183(6):4127-4134 (2009); or an antibody from R&D:MAB3734.

[0420] In one embodiment, an antigen binding domain against ALK is an antigen binding portion, e.g., CDRs, of an antibody described in, e.g., Mino-Kenudson et al., Clin Cancer Res 16(5):1561-1571 (2010).

[0421] In one embodiment, an antigen binding domain against polysialic acid is an antigen binding portion, e.g., CDRs, of an antibody described in, e.g., Nagae et al., J Biol Chem 288(47):33784-33796 (2013).

[0422] In one embodiment, an antigen binding domain against PLAC1 is an antigen binding portion, e.g., CDRs, of an antibody described in, e.g., Ghods et al., Biotechnol Appl Biochem 2013 doi:10.1002/bab.1177.

[0423] In one embodiment, an antigen binding domain against GloboH is an antigen binding portion of the antibody VK9; or an antibody described in, e.g., Kudryashov V et al, Glycoconj J. 15(3):243-9 (1998), Lou et al., Proc Natl Acad Sci USA 111(7):2482-2487 (2014); MBr1: Bremer E-G et al. J Biol Chem 259:14773-14777 (1984).

[0424] In one embodiment, an antigen binding domain against NY-BR-1 is an antigen binding portion, e.g., CDRs of an antibody described in, e.g., Jager et al., Appl Immunohistochem Mol Morphol 15(1):77-83 (2007).

[0425] In one embodiment, an antigen binding domain against WT-1 is an antigen binding portion, e.g., CDRs, of an antibody described in, e.g., Dao et al., Sci Transl Med 5(176):176ra33 (2013); or WO2012/135854.

[0426] In one embodiment, an antigen binding domain against MAGE-A1 is an antigen binding portion, e.g., CDRs, of an antibody described in, e.g., Willemsen et al., J Immunol 174(12):7853-7858 (2005) (TCR-like scFv).

[0427] In one embodiment, an antigen binding domain against sperm protein 17 is an antigen binding portion, e.g., CDRs, of an antibody described in, e.g., Song et al., Target Oncol 2013 Aug. 14 (PMID: 23943313); Song et al., Med Oncol 29(4):2923-2931 (2012).

[0428] In one embodiment, an antigen binding domain against Tie 2 is an antigen binding portion, e.g., CDRs, of the antibody AB33 (Cell Signaling Technology).

[0429] In one embodiment, an antigen binding domain against MAD-CT-2 is an antigen binding portion, e.g., CDRs, of an antibody described in, e.g., PMID: 2450952; U.S. Pat. No. 7,635,753.

[0430] In one embodiment, an antigen binding domain against Fos-related antigen 1 is an antigen binding portion, e.g., CDRs, of the antibody 12F9 (Novus Biologicals).

[0431] In one embodiment, an antigen binding domain against MelanA/MART1 is an antigen binding portion, e.g., CDRs, of an antibody described in, EP2514766 A2; or U.S. Pat. No. 7,749,719.

[0432] In one embodiment, an antigen binding domain against sarcoma translocation breakpoints is an antigen binding portion, e.g., CDRs, of an antibody described in, e.g., Luo et al, EMBO Mol. Med. 4(6):453-461 (2012).

[0433] In one embodiment, an antigen binding domain against TRP-2 is an antigen binding portion, e.g., CDRs, of an antibody described in, e.g., Wang et al, J Exp Med. 184(6):2207-16 (1996).

[0434] In one embodiment, an antigen binding domain against CYP1B1 is an antigen binding portion, e.g., CDRs, of an antibody described in, e.g., Maecker et al, Blood 102 (9): 3287-3294 (2003).

[0435] In one embodiment, an antigen binding domain against RAGE-1 is an antigen binding portion, e.g., CDRs, of the antibody MAB5328 (EMD Millipore).

[0436] In one embodiment, an antigen binding domain against human telomerase reverse transcriptase is an antigen binding portion, e.g., CDRs, of the antibody cat no: LS-B95-100 (Lifespan Biosciences)

[0437] In one embodiment, an antigen binding domain against intestinal carboxyl esterase is an antigen binding portion, e.g., CDRs, of the antibody 4F12: cat no: LS-B6190-50 (Lifespan Biosciences).

[0438] In one embodiment, an antigen binding domain against mut hsp70-2 is an antigen binding portion, e.g., CDRs, of the antibody LifespanBiosciences: monoclonal: cat no: LS-C133261-100 (Lifespan Biosciences).

[0439] In one embodiment, an antigen binding domain against CD79a is an antigen binding portion, e.g., CDRs, of the antibody Anti-CD79a antibody [HM47/A9] (ab3121), available from Abcam; antibody CD79A Antibody #3351 available from Cell Signalling Technology; or antibody HPA017748—Anti-CD79A antibody produced in rabbit, available from Sigma Aldrich.

[0440] In one embodiment, an antigen binding domain against CD79b is an antigen binding portion, e.g., CDRs, of the antibody polatuzumab vedotin, anti-CD79b described in Dornan et al., “Therapeutic potential of an anti-CD79b antibody-drug conjugate, anti-CD79b-vc-MMAE, for the treatment of non-Hodgkin lymphoma” Blood. 2009 Sep. 24; 114(13):2721-9. doi: 10.1182/blood-2009-02-205500. Epub 2009 Jul. 24, or the bispecific antibody Anti-CD79b/CD3 described in “4507 Pre-Clinical Characterization of T Cell-Dependent Bispecific Antibody Anti-CD79b/CD3 As a Potential Therapy for B Cell Malignancies” Abstracts of 56^{th} ASH Annual Meeting and Exposition, San Francisco, CA Dec. 6-9, 2014.

[0441] In one embodiment, an antigen binding domain against CD72 is an antigen binding portion, e.g., CDRs, of the antibody J3-109 described in Myers, and Uckun, “An anti-CD72 immunotoxin against therapy-refractory B-lineage acute lymphoblastic leukemia.” Leuk Lymphoma. 1995 June; 18(1-2):119-22, or anti-CD72 (10D6.8.1, mIgGI) described in Polson et al., “Antibody-Drug Conjugates for the Treatment of Non-Hodgkin's Lymphoma: Target and Linker-Drug Selection” Cancer Res Mar. 15, 2009 69; 2358.

[0442] In one embodiment, an antigen binding domain against LAIR1 is an antigen binding portion, e.g., CDRs, of the antibody ANT-301 LAIR1 antibody, available from ProSpec; or anti-human CD305 (LAIR1) Antibody, available from BioLegend.

[0443] In one embodiment, an antigen binding domain against FCAR is an antigen binding portion, e.g., CDRs, of the antibody CD89/FCARAntibody (Catalog #10414-H08H), available from Sino Biological Inc.

[0444] In one embodiment, an antigen binding domain against LILRA2 is an antigen binding portion, e.g., CDRs, of the antibody LILRA2 monoclonal antibody (M17), clone 3C7, available from Abnova, or Mouse Anti-LILRA2 antibody, Monoclonal (2D7), available from Lifespan Biosciences.

[0445] In one embodiment, an antigen binding domain against CD300LF is an antigen binding portion, e.g., CDRs, of the antibody Mouse Anti-CMRF35-like molecule 1 antibody, Monoclonal[UP-D2], available from BioLegend, or Rat Anti-CMRF35-like molecule 1 antibody, Monoclonal[234903], available from R&D Systems.

[0446] In one embodiment, an antigen binding domain against CLEC12A is an antigen binding portion, e.g., CDRs, of the antibody Bispecific T cell Engager (BiTE) scFv-antibody and ADC described in Noordhuis et al., “Targeting of CLEC12A In Acute Myeloid Leukemia by Antibody-Drug-Conjugates and Bispecific CLL-1×CD3 BiTE Antibody” 53^{rd} ASH Annual Meeting and Exposition, Dec. 10-13, 2011, and MCLA-117 (Merus).

[0447] In one embodiment, an antigen binding domain against BST2 (also called CD317) is an antigen binding portion, e.g., CDRs, of the antibody Mouse Anti-CD317 antibody, Monoclonal[3H4], available from Antibodies-Online or Mouse Anti-CD317 antibody, Monoclonal[696739], available from R&D Systems.

[0448] In one embodiment, an antigen binding domain against EMR2 (also called CD312) is an antigen binding portion, e.g., CDRs, of the antibody Mouse Anti-CD312 antibody, Monoclonal[LS-B8033] available from Lifespan Biosciences, or Mouse Anti-CD312 antibody, Monoclonal[494025] available from R&D Systems.

[0449] In one embodiment, an antigen binding domain against LY75 is an antigen binding portion, e.g., CDRs, of the antibody Mouse Anti-Lymphocyte antigen 75 antibody, Monoclonal[HD30] available from EMD Millipore or Mouse Anti-Lymphocyte antigen 75 antibody, Monoclonal[A15797] available from Life Technologies.

[0450] In one embodiment, an antigen binding domain against GPC3 is an antigen binding portion, e.g., CDRs, of the antibody hGC33 described in Nakano K, Ishiguro T, Konishi H, et al. Generation of a humanized anti-glypican 3 antibody by CDR grafting and stability optimization. Anticancer Drugs. 2010 November; 21(10):907-916, or MDX-1414, HN3, or YP7, all three of which are described in Feng et al., “Glypican-3 antibodies: a new therapeutic target for liver cancer.” FEBS Lett. 2014 Jan. 21; 588(2):377-82.

[0451] In one embodiment, an antigen binding domain against FCRL5 is an antigen binding portion, e.g., CDRs, of the anti-FcRL5 antibody described in Elkins et al., “FcRL5 as a target of antibody-drug conjugates for the treatment of multiple myeloma” Mol Cancer Ther. 2012 October; 11(10):2222-32. In one embodiment, an antigen binding domain against FCRL5 is an antigen binding portion, e.g., CDRs, of the anti-FcRL5 antibody described in, for example, WO2001/038490, WO/2005/117986, WO2006/039238, WO2006/076691, WO2010/114940, WO2010/120561, or WO2014/210064.

[0452] In one embodiment, an antigen binding domain against IGLL1 is an antigen binding portion, e.g., CDRs, of the antibody Mouse Anti-Immunoglobulin lambda-like polypeptide 1 antibody, Monoclonal[AT1G4] available from Lifespan Biosciences, Mouse Anti-Immunoglobulin lambda-like polypeptide 1 antibody, Monoclonal[HSL11] available from BioLegend.

[0453] In one embodiment, the antigen binding domain comprises one, two three (e.g., all three) heavy chain CDRs, HC CDR1, HC CDR2 and HC CDR3, from an antibody listed above, and/or one, two, three (e.g., all three) light chain CDRs, LC CDR1, LC CDR2 and LC CDR3, from an antibody listed above. In one embodiment, the antigen binding domain comprises a heavy chain variable region and/or a variable light chain region of an antibody listed above.

[0454] In another aspect, the antigen binding domain comprises a humanized antibody or an antibody fragment. In some aspects, a non-human antibody is humanized, where specific sequences or regions of the antibody are modified to increase similarity to an antibody naturally produced in a human or fragment thereof. In one aspect, the antigen binding domain is humanized.

[0455] CARs that bind to mesothelin are known in the art. For example, those disclosed in WO2015090230 and WO2017112741, for example, Tables 2, 3, 4, and 5 of WO2017112741, incorporated herein by reference, that bind human mesothelin. Any known mesothelin CAR, for example, the mesothelin antigen binding domain of any known mesothelin CAR, in the art can be used in accordance with the present disclosure.

[0456] CARs that bind to GFR ALPHA-4 are known in the art. For example, those disclosed in WO2016/025880 can be used in accordance with the present disclosure. Any known GFR ALPHA-4 CAR, for example, the GFR ALPHA-4 antigen binding domain of any known GFR ALPHA-4 CAR, in the art can be used in accordance with the present disclosure. The amino acid and nucleotide sequences encoding the GFR ALPHA-4 CAR molecules and antigen binding domains (for example, including one, two, three VH CDRs; and one, two, three VL CDRs according to Kabat or Chothia), are specified in WO2016/025880.

### Antigen Binding Domain Structures

[0457] In some embodiments, the antigen binding domain of the encoded CAR molecule comprises an antibody, an antibody fragment, an scFv, a Fv, a Fab, a (Fab′)2, a single domain antibody (SDAB), a VH or VL domain, a camelid VHH domain or a bi-functional (e.g. bi-specific) hybrid antibody (e.g., Lanzavecchia et al., Eur. J. Immunol. 17, 105 (1987)).

[0458] In some instances, scFvs can be prepared according to method known in the art (see, for example, Bird et al., (1988) Science 242:423-426 and Huston et al., (1988) Proc. Natl. Acad. Sci. USA 85:5879-5883). ScFv molecules can be produced by linking VH and VL regions together using flexible polypeptide linkers. The scFv molecules comprise a linker (e.g., a Ser-Gly linker) with an optimized length and/or amino acid composition. The linker length can greatly affect how the variable regions of a scFv fold and interact. In fact, if a short polypeptide linker is employed (e.g., between 5-10 amino acids) intrachain folding is prevented. Interchain folding is also required to bring the two variable regions together to form a functional epitope binding site. For examples of linker orientation and size see, e.g., Hollinger et al. 1993 Proc Natl Acad. Sci. U.S.A. 90:6444-6448, U.S. Patent Application Publication Nos. 2005/0100543, 2005/0175606, 2007/0014794, and PCT publication Nos. WO2006/020258 and WO2007/024715, is incorporated herein by reference.

[0459] An scFv can comprise a linker of at least 1, 2, 3, 4, 5, 6, 7, 8, 9, 10, 11, 12, 13, 14, 15, 16, 17, 18, 19, 20, 25, 30, 35, 40, 45, 50, or more amino acid residues between its VL and VH regions. The linker sequence may comprise any naturally occurring amino acid. In some embodiments, the linker sequence comprises amino acids glycine and serine. In another embodiment, the linker sequence comprises sets of glycine and serine repeats such as (Gly₄Ser)ₙ, where n is a positive integer equal to or greater than 1 (SEQ ID NO:22). In some embodiments, the linker can be (Gly₄Ser)₄ (SEQ ID NO:29) or (Gly₄Ser)₃ (SEQ ID NO:30). Variation in the linker length may retain or enhance activity, giving rise to superior efficacy in activity studies.

[0460] In another aspect, the antigen binding domain is a T cell receptor (“TCR”), or a fragment thereof, for example, a single chain TCR (scTCR). Methods to make such TCRs are known in the art. See, e.g., Willemsen R A et al, Gene Therapy 7: 1369-1377 (2000); Zhang T et al, Cancer Gene Ther 11: 487-496 (2004); Aggen et al, Gene Ther. 19(4):365-74 (2012) (references are incorporated herein by its entirety). For example, scTCR can be engineered that contains the Va and VP genes from a T cell clone linked by a linker (e.g., a flexible peptide). This approach is very useful to cancer associated target that itself is intracellular, however, a fragment of such antigen (peptide) is presented on the surface of the cancer cells by MHC.

[0461] In certain embodiments, the encoded antigen binding domain has a binding affinity KD of 10⁻⁴ M to 10⁻⁸ M.

[0462] In some embodiments, the encoded CAR molecule comprises an antigen binding domain that has a binding affinity KD of 10⁻⁴ M to 10⁻⁸ M, e.g., 10⁻⁵ M to 10⁻⁷ M, e.g., 10⁻⁶ M or 10⁻⁷ M, for the target antigen. In some embodiments, the antigen binding domain has a binding affinity that is at least five-fold, 10-fold, 20-fold, 30-fold, 50-fold, 100-fold or 1,000-fold less than a reference antibody, e.g., an antibody described herein. In some embodiments, the encoded antigen binding domain has a binding affinity at least 5-fold less than a reference antibody (e.g., an antibody from which the antigen binding domain is derived). In some aspects such antibody fragments are functional in that they provide a biological response that can include, but is not limited to, activation of an immune response, inhibition of signal-transduction origination from its target antigen, inhibition of kinase activity, and the like, as will be understood by a skilled artisan.

[0463] In some aspects, the antigen binding domain of the CAR is a scFv antibody fragment that is humanized compared to the murine sequence of the scFv from which it is derived.

[0464] In some aspects, the antigen binding domain of a CAR described herein (e.g., a scFv) is encoded by a nucleic acid molecule whose sequence has been codon optimized for expression in a mammalian cell. In some aspects, entire CAR construct is encoded by a nucleic acid molecule whose entire sequence has been codon optimized for expression in a mammalian cell. Codon optimization refers to the discovery that the frequency of occurrence of synonymous codons (i.e., codons that code for the same amino acid) in coding DNA is biased in different species. Such codon degeneracy allows an identical polypeptide to be encoded by a variety of nucleotide sequences. A variety of codon optimization methods is known in the art, and include, e.g., methods disclosed in at least U.S. Pat. Nos. 5,786,464 and 6,114,148.

[0465] Specific antigen antibody pairs are known in the art. Non-limiting exemplary embodiments of antigen antibody pairs and components thereof are provided herein above in the section titled Targets and below.

### Bispecific CARs

[0466] In certain embodiments, the antigen binding domain is a bi- or multi-specific molecule (e.g., a multispecific antibody molecule). In some embodiments a multispecific antibody molecule is a bispecific antibody molecule. A bispecific antibody has specificity for no more than two antigens. A bispecific antibody molecule is characterized by a first immunoglobulin variable domain sequence which has binding specificity for a first epitope and a second immunoglobulin variable domain sequence that has binding specificity for a second epitope. In some embodiments the first and second epitopes are on the same antigen, e.g., the same protein (or subunit of a multimeric protein). In some embodiments the first and second epitopes overlap. In some embodiments the first and second epitopes do not overlap. In some embodiments the first and second epitopes are on different antigens, e.g., different proteins (or different subunits of a multimeric protein). In some embodiments a bispecific antibody molecule comprises a heavy chain variable domain sequence and a light chain variable domain sequence which have binding specificity for a first epitope and a heavy chain variable domain sequence and a light chain variable domain sequence which have binding specificity for a second epitope. In some embodiments a bispecific antibody molecule comprises a half antibody having binding specificity for a first epitope and a half antibody having binding specificity for a second epitope. In some embodiments a bispecific antibody molecule comprises a half antibody, or fragment thereof, having binding specificity for a first epitope and a half antibody, or fragment thereof, having binding specificity for a second epitope. In some embodiments a bispecific antibody molecule comprises a scFv, or fragment thereof, have binding specificity for a first epitope and a scFv, or fragment thereof, have binding specificity for a second epitope.

[0467] In some embodiments, the antibody molecule is a multi-specific (e.g., a bispecific or a trispecific) antibody molecule. Such molecules include bispecific fusion proteins, e.g., an expression construct containing two scFvs with a hydrophilic helical peptide linker between them and a full constant region, as described in, e.g., U.S. Pat. No. 5,637,481; minibody constructs with linked VL and VH chains further connected with peptide spacers to an antibody hinge region and CH3 region, which can be dimerized to form bispecific/multivalent molecules, as described in, e.g., U.S. Pat. No. 5,837,821; String of VH domains (or VL domains in family members) connected by peptide linkages with crosslinkable groups at the C-terminus further associated with VL domains to form a series of FVs (or scFvs), as described in, e.g., U.S. Pat. No. 5,864,019; and single chain binding polypeptides with both a VH and a VL domain linked through a peptide linker are combined into multivalent structures through non-covalent or chemical crosslinking to form, e.g., homobivalent, heterobivalent, trivalent, and tetravalent structures using both scFV or diabody type format, as described in, e.g., U.S. Pat. No. 5,869,620. The contents of the above-referenced applications are incorporated herein by reference in their entireties.

[0468] Within each antibody or antibody fragment (e.g., scFv) of a bispecific antibody molecule, the VH can be upstream or downstream of the VL. In some embodiments, the upstream antibody or antibody fragment (e.g., scFv) is arranged with its VH (VH1) upstream of its VL (VL1) and the downstream antibody or antibody fragment (e.g., scFv) is arranged with its VL (VL2) upstream of its VH (VH2), such that the overall bispecific antibody molecule has the arrangement VH1-VL1-VL2-VH2. In other embodiments, the upstream antibody or antibody fragment (e.g., scFv) is arranged with its VL (VL1) upstream of its VH (VH1) and the downstream antibody or antibody fragment (e.g., scFv) is arranged with its VH (VH2) upstream of its VL (VL2), such that the overall bispecific antibody molecule has the arrangement VL1-VH1-VH2-VL2. Optionally, a linker is disposed between the two antibodies or antibody fragments (e.g., scFvs), e.g., between VL1 and VL2 if the construct is arranged as VH1-VL1-VL2-VH2, or between VH1 and VH2 if the construct is arranged as VL1-VH1-VH2-VL2. The linker may be a linker as described herein, e.g., a (Gly₄-Ser)ₙ linker, wherein n is 1, 2, 3, 4, 5, or 6, preferably 4 (SEQ ID NO: 691). In general, the linker between the two scFvs should be long enough to avoid mispairing between the domains of the two scFvs. Optionally, a linker is disposed between the VL and VH of the first scFv. Optionally, a linker is disposed between the VL and VH of the second scFv. In constructs that have multiple linkers, any two or more of the linkers can be the same or different. Accordingly, in some embodiments, a bispecific CAR comprises VLs, VHs, and optionally one or more linkers in an arrangement as described herein.

### Transmembrane Domains

[0469] With respect to the transmembrane domain, in various embodiments, a chimeric molecule as described herein (e.g., a CAR) can be designed to comprise a transmembrane domain that is attached to the extracellular domain of the chimeric molecule. A transmembrane domain can include one or more additional amino acids adjacent to the transmembrane region, e.g., one or more amino acid associated with the extracellular region of the protein from which the transmembrane was derived (e.g., 1, 2, 3, 4, 5, 6, 7, 8, 9, 10 up to 15 amino acids of the extracellular region) and/or one or more additional amino acids associated with the intracellular region of the protein from which the transmembrane protein is derived (e.g., 1, 2, 3, 4, 5, 6, 7, 8, 9, 10 up to 15 amino acids of the intracellular region). In some aspects, the transmembrane domain is one that is associated with one of the other domains of the chimeric protein (e.g., CAR) e.g., in some embodiments, the transmembrane domain may be from the same protein that the signaling domain, costimulatory domain or the hinge domain is derived from. In another aspect, the transmembrane domain is not derived from the same protein that any other domain of the chimeric protein (e.g., CAR) is derived from. In some instances, the transmembrane domain can be selected or modified by amino acid substitution to avoid binding of such domains to the transmembrane domains of the same or different surface membrane proteins, e.g., to minimize interactions with other members of the receptor complex. In some aspects, the transmembrane domain is capable of homodimerization with another CAR on the cell surface of a CAR-expressing cell. In a different aspect, the amino acid sequence of the transmembrane domain may be modified or substituted so as to minimize interactions with the binding domains of the native binding partner present in the same CAR-expressing cell.

[0470] The transmembrane domain may be derived either from a natural or from a recombinant source. Where the source is natural, the domain may be derived from any membrane-bound or transmembrane protein. In some aspects the transmembrane domain is capable of signaling to the intracellular domain(s) whenever the CAR has bound to a target. A transmembrane domain of particular use in this invention may include at least the transmembrane region(s) of e.g., the alpha, beta or zeta chain of the T-cell receptor, CD28, CD27, CD3 epsilon, CD45, CD4, CD5, CD8, CD9, CD16, CD22, CD33, CD37, CD64, CD80, CD86, CD134, CD137, CD154. In some embodiments, a transmembrane domain may include at least the transmembrane region(s) of, e.g., KIRDS2, OX40, CD2, CD27, LFA-1 (CD11a, CD18), ICOS (CD278), 4-1BB (CD137), GITR, CD40, BAFFR, HVEM (LIGHTR), SLAMF7, NKp80 (KLRF1), NKp44, NKp30, NKp46, CD160, CD19, IL2R beta, IL2R gamma, IL,7R a, ITGA1, VLA1, CD49a, ITGA4, IA4, CD49D, ITGA6, VLA-6, CD49f, ITGAD, CD11d, ITGAE, CD103, ITGAL, CD11a, LFA-1, ITGAM, CD11b, ITGAX, CD11c, ITGB1, CD29, ITGB2, CD18, LFA-1, ITGB7, TNFR2, DNAM1 (CD226), SLAMF4 (CD244, 2B4), CD84, CD96 (Tactile), CEACAM1, CRTAM, Ly9 (CD229), CD160 (BY55), PSGL1, CD100 (SEMA4D), SLAMF6 (NTB-A, Ly108), SLAM (SLAMF1, CD150, IPO-3), BLAME (SLAMF8), SELPLG (CD162), LTBR, PAG/Cbp, NKG2D, or NKG2C.

[0471] In some instances, the transmembrane domain can be attached to the extracellular region of the CAR, e.g., the antigen binding domain of the CAR, via a hinge, e.g., a hinge from a human protein. For example, in some embodiments, the hinge can be a human Ig (immunoglobulin) hinge (e.g., an IgG4 hinge, an IgD hinge), a GS linker (e.g., a GS linker described herein), a KIR2DS2 hinge or a CD8a hinge. In some embodiments, the hinge or spacer comprises (e.g., consists of) the amino acid sequence of SEQ ID NO:4. In some aspects, the transmembrane domain comprises (e.g., consists of) a transmembrane domain of SEQ ID NO: 12.

[0472] In some embodiments, the encoded transmembrane domain comprises an amino acid sequence of a CD8 transmembrane domain having at least one, two or three modifications but not more than 20, 10 or 5 modifications of an amino acid sequence of SEQ ID NO: 12, or a sequence with 95-99% identity to an amino acid sequence of SEQ ID NO: 12. In some embodiments, the encoded transmembrane domain comprises the sequence of SEQ ID NO: 12.

[0473] In other embodiments, the nucleic acid molecule encoding the CAR comprises a nucleotide sequence of a CD8 transmembrane domain, e.g., comprising the sequence of SEQ ID NO: 13, or a sequence with 95-99% identity thereof.

[0474] In some embodiments, the encoded antigen binding domain is connected to the transmembrane domain by a hinge region. In some embodiments, the encoded hinge region comprises the amino acid sequence of a CD8 hinge, e.g., SEQ ID NO: 4; or the amino acid sequence of an IgG4 hinge, e.g., SEQ ID NO: 6, or a sequence with 95-99% identity to SEQ ID NO:4 or 6. In other embodiments, the nucleic acid sequence encoding the hinge region comprises a sequence of SEQ ID NO: 5 or SEQ ID NO: 7, corresponding to a CD8 hinge or an IgG4 hinge, respectively, or a sequence with 95-99% identity to SEQ ID NO:5 or 7.

[0475] In some aspects, the hinge or spacer comprises an IgG4 hinge. For example, in some embodiments, the hinge or spacer comprises a hinge of the amino acid sequence ESKYGPPCPPCPAPEFLGGPSVFLFPPKPKDTLMISRTPEVTCVVVDVSQEDPEVQFNWYVDG VEVHNAKTKPREEQFNSTYRVVSVLTVLHQDWLNGKEYKCKVSNKGLPSSIEKTISKAKGQP REPQVYTLPPSQEEMTKNQVSLTCLVKGFYPSDIAVEWESNGQPENNYKTTPPVLDSDGSFFL YSRLTVDKSRWQEGNVFSCSVMHEALHNHYTQKSLSLSLGKM (SEQ ID NO:6). In some embodiments, the hinge or spacer comprises a hinge encoded by a nucleotide sequence of

(SEQ ID NO: 7)
GAGAGCAAGTACGGCCCTCCCTGCCCCCCTTGCCCTGCCCCCGAG
TTCCTGGGCGGACCCAGCGTGTTCCTGTTCCCCCCCAAGCCCAAG
GACACCCTGATGATCAGCCGGACCCCCGAGGTGACCTGTGTGGTG
GTGGACGTGTCCCAGGAGGACCCCGAGGTCCAGTTCAACTGGTAC
GTGGACGGCGTGGAGGTGCACAACGCCAAGACCAAGCCCCGGGAG
GAGCAGTTCAATAGCACCTACCGGGTGGTGTCCGTGCTGACCGTG
CTGCACCAGGACTGGCTGAACGGCAAGGAATACAAGTGTAAGGTG
TCCAACAAGGGCCTGCCCAGCAGCATCGAGAAAACCATCAGCAAG
GCCAAGGGCCAGCCTCGGGAGCCCCAGGTGTACACCCTGCCCCCT
AGCCAAGAGGAGATGACCAAGAACCAGGTGTCCCTGACCTGCCTG
GTGAAGGGCTTCTACCCCAGCGACATCGCCGTGGAGTGGGAGAGC
AACGGCCAGCCCGAGAACAACTACAAGACCACCCCCCCTGTGCTG
GACAGCGACGGCAGCTTCTTCCTGTACAGCCGGCTGACCGTGGAC
AAGAGCCGGTGGCAGGAGGGCAACGTCTTTAGCTGCTCCGTGATG
CACGAGGCCCTGCACAACCACTACACCCAGAAGAGCCTGAGCCTG
TCCCTGGGCAAGATG.

[0476] In some aspects, the hinge or spacer comprises an IgD hinge. For example, in some embodiments, the hinge or spacer comprises a hinge of the amino acid sequence RWPESPKAQASSVPTAQPQAEGSLAKATTAPATTRNTGRGGEEKKKEKEKEEQEERETKTPE CPSHTQPLGVYLLTPAVQDLWLRDKATFTCFVVGSDLKDAHLTWEVAGKVPTGGVEEGLLE RHSNGSQSQHSRLTLPRSLWNAGTSVTCTLNHPSLPPQRLMALREPAAQAPVKLSLNLLASS DPPEAASWLLCEVSGFSPPNILLMWLEDQREVNTSGFAPARPPPQPGSTTFWAWSVLRVPAPP SPQPATYTCVVSHEDSRTLLNASRSLEVSYVTDH (SEQ ID NO:8). In some embodiments, the hinge or spacer comprises a hinge encoded by a nucleotide sequence of

(SEQ ID NO: 9)
AGGTGGCCCGAAAGTCCCAAGGCCCAGGCATCTAGTGTTCCTACT
GCACAGCCCCAGGCAGAAGGCAGCCTAGCCAAAGCTACTACTGCA
CCTGCCACTACGCGCAATACTGGCCGTGGCGGGGAGGAGAAGAAA
AAGGAGAAAGAGAAAGAAGAACAGGAAGAGAGGGAGACCAAGACC
CCTGAATGTCCATCCCATACCCAGCCGCTGGGCGTCTATCTCTTG
ACTCCCGCAGTACAGGACTTGTGGCTTAGAGATAAGGCCACCTTT
ACATGTTTCGTCGTGGGCTCTGACCTGAAGGATGCCCATTTGACT
TGGGAGGTTGCCGGAAAGGTACCCACAGGGGGGGTTGAGGAAGGG
TTGCTGGAGCGCCATTCCAATGGCTCTCAGAGCCAGCACTCAAGA
CTCACCCTTCCGAGATCCCTGTGGAACGCCGGGACCTCTGTCACA
TGTACTCTAAATCATCCTAGCCTGCCCCCACAGCGTCTGATGGCC
CTTAGAGAGCCAGCCGCCCAGGCACCAGTTAAGCTTAGCCTGAAT
CTGCTCGCCAGTAGTGATCCCCCAGAGGCCGCCAGCTGGCTCTTA
TGCGAAGTGTCCGGCTTTAGCCCGCCCAACATCTTGCTCATGTGG
CTGGAGGACCAGCGAGAAGTGAACACCAGCGGCTTCGCTCCAGCC
CGGCCCCCACCCCAGCCGGGTTCTACCACATTCTGGGCCTGGAGT
GTCTTAAGGGTCCCAGCACCACCTAGCCCCCAGCCAGCCACATAC
ACCTGTGTTGTGTCCCATGAAGATAGCAGGACCCTGCTAAATGCT
TCTAGGAGTCTGGAGGTTTCCTACGTGACTGACCATT.

[0477] In some aspects, the transmembrane domain may be recombinant, in which case it will comprise predominantly hydrophobic residues such as leucine and valine. In some aspects a triplet of phenylalanine, tryptophan and valine can be found at each end of a recombinant transmembrane domain.

[0478] Optionally, a short oligo- or polypeptide linker, between 2 and 10 amino acids in length may form the linkage between the transmembrane domain and the cytoplasmic region of the CAR. A glycine-serine doublet provides a particularly suitable linker. For example, in some aspects, the linker comprises the amino acid sequence of GGGGSGGGGS (SEQ ID NO:10). In some embodiments, the linker is encoded by a nucleotide sequence of GGTGGCGGAGGTTCTGGAGGTGGAGGTTCC (SEQ ID NO:11). In some embodiments, the linker comprises the amino acid sequence of GGGGS (SEQ ID NO: 877). In some embodiments the linker is encoded by a nucleotide sequence of SEQ ID NO: 876).

[0479] In some aspects, the hinge or spacer comprises a KIR2DS2 hinge.

### Signaling Domains

[0480] In embodiments of the invention having an intracellular signaling domain, such a domain can contain, e.g., one or more of a primary signaling domain and/or a costimulatory signaling domain. In some embodiments, the intracellular signaling domain comprises a sequence encoding a primary signaling domain. In some embodiments, the intracellular signaling domain comprises a costimulatory signaling domain. In some embodiments, the intracellular signaling domain comprises a primary signaling domain and a costimulatory signaling domain.

[0481] The intracellular signaling sequences within the cytoplasmic portion of the CAR of the invention may be linked to each other in a random or specified order. Optionally, a short oligo- or polypeptide linker, for example, between 2 and 10 amino acids (e.g., 2, 3, 4, 5, 6, 7, 8, 9, or 10 amino acids) in length may form the linkage between intracellular signaling sequences. In some embodiments, a glycine-serine doublet can be used as a suitable linker. In some embodiments, a single amino acid, e.g., an alanine, a glycine, can be used as a suitable linker.

[0482] In some aspects, the intracellular signaling domain is designed to comprise two or more, e.g., 2, 3, 4, 5, or more, costimulatory signaling domains. In some embodiments, the two or more, e.g., 2, 3, 4, 5, or more, costimulatory signaling domains, are separated by a linker molecule, e.g., a linker molecule described herein. In some embodiments, the intracellular signaling domain comprises two costimulatory signaling domains. In some embodiments, the linker molecule is a glycine residue. In some embodiments, the linker is an alanine residue.

### Primary Signaling Domains

[0483] A primary signaling domain regulates primary activation of the TCR complex either in a stimulatory way, or in an inhibitory way. Primary intracellular signaling domains that act in a stimulatory manner may contain signaling motifs which are known as immunoreceptor tyrosine-based activation motifs or ITAMs. In CARs such domains are used for the same purpose. Examples of ITAM containing primary intracellular signaling domains that are of particular use in the invention include those of CD3 zeta, common FcR gamma (FCER1G). Fc gamma RIIa. FcR beta(Fc Epsilon R1b), CD3 gamma, CD3 delta, CD3 epsilon CD79a, CD79b, DAP10, and DAP12. In some embodiments, a CAR of the invention comprises an intracellular signaling domain, e.g., a primary signaling domain of CD3-zeta.

[0484] In some embodiments, the encoded primary signaling domain comprises a functional signaling domain of CD3 zeta. The encoded CD3 zeta primary signaling domain can comprise an amino acid sequence having at least one, two or three modifications but not more than 20, 10 or 5 modifications of an amino acid sequence of SEQ ID NO: 18 or SEQ ID NO: 20, or a sequence with 95-99% identity to an amino acid sequence of SEQ ID NO:18 or SEQ ID NO: 20. In some embodiments, the encoded primary signaling domain comprises a sequence of SEQ ID NO:18 or SEQ ID NO: 20. In other embodiments, the nucleic acid sequence encoding the primary signaling domain comprises a sequence of SEQ ID NO:19 or SEQ ID NO: 21, or a sequence with 95-99% identity thereof.

### Costimulatory Signaling Domains

[0485] In some embodiments, the encoded intracellular signaling domain comprises a costimulatory signaling domain. For example, the intracellular signaling domain can comprise a primary signaling domain and a costimulatory signaling domain. In some embodiments, the encoded costimulatory signaling domain comprises a functional signaling domain of a protein chosen from one or more of CD27, CD28, 4-1BB (CD137), OX40, CD30, CD40, PD-1, ICOS, lymphocyte function-associated antigen-1 (LFA-1), CD2, CD7, LIGHT, NKG2C, B7-H3, a ligand that specifically binds with CD83, CDS, ICAM-1, GITR, BAFFR, HVEM (LIGHTR), SLAMF7, NKp80 (KLRF1), CD160, CD19, CD4, CD8alpha, CD8beta, IL2R beta, IL2R gamma, IL7R alpha, ITGA4, VLA1, CD49a, ITGA4, IA4, CD49D, ITGA6, VLA-6, CD49f, ITGAD, CD11d, ITGAE, CD103, ITGAL, CD11a, LFA-1, ITGAM, CD11b, ITGAX, CDIIc, ITGB1, CD29, ITGB2, CD18, LFA-1, ITGB7, TNFR2, TRANCE/RANKL, DNAM1 (CD226), SLAMF4 (CD244, 2B4), CD84, CD96 (Tactile), CEACAM1, CRTAM, Ly9 (CD229), CD160 (BY55), PSGL1, CD100 (SEMA4D), CD69, SLAMF6 (NTB-A, Ly108), SLAM (SLAMF1, CD150, IPO-3), BLAME (SLAMF8), SELPLG (CD162), LTBR, LAT, GADS, SLP-76, PAG/Cbp, NKp44, NKp30, NKp46, and NKG2D.

[0486] In some embodiments, the encoded costimulatory signaling domain comprises an amino acid sequence having at least one, two or three modifications but not more than 20, 10 or 5 modifications of an amino acid sequence of SEQ ID NO:14 or SEQ ID NO: 16, or a sequence with 95-99% identity to an amino acid sequence of SEQ ID NO:14 or SEQ ID NO: 16. In some embodiments, the encoded costimulatory signaling domain comprises a sequence of SEQ ID NO: 14 or SEQ ID NO: 16. In other embodiments, the nucleic acid sequence encoding the costimulatory signaling domain comprises a sequence of SEQ ID NO:15 or SEQ ID NO: 17, or a sequence with 95-99% identity thereof.

[0487] In other embodiments, the encoded intracellular domain comprises the sequence of SEQ ID NO: 14 or SEQ ID NO: 16, and the sequence of SEQ ID NO: 18 or SEQ ID NO: 20, wherein the sequences comprising the intracellular signaling domain are expressed in the same frame and as a single polypeptide chain.

[0488] In some embodiments, the nucleic acid sequence encoding the intracellular signaling domain comprises a sequence of SEQ ID NO:15 or SEQ ID NO: 17, or a sequence with 95-99% identity thereof, and a sequence of SEQ ID NO:19 or SEQ ID NO:21, or a sequence with 95-99% identity thereof.

[0489] In some embodiments, the nucleic acid molecule further encodes a leader sequence. In some embodiments, the leader sequence comprises the sequence of SEQ ID NO: 2.

[0490] In some aspects, the intracellular signaling domain is designed to comprise the signaling domain of CD3-zeta and the signaling domain of CD28. In some aspects, the intracellular signaling domain is designed to comprise the signaling domain of CD3-zeta and the signaling domain of 4-1BB. In some aspects, the signaling domain of 4-1BB is a signaling domain of SEQ ID NO: 14. In some aspects, the signaling domain of CD3-zeta is a signaling domain of SEQ ID NO: 18.

[0491] In some aspects, the intracellular signaling domain is designed to comprise the signaling domain of CD3-zeta and the signaling domain of CD27. In some aspects, the signaling domain of CD27 comprises an amino acid sequence of QRRKYRSNKGESPVEPAEPCRYSCPREEEGSTIPIQEDYRKPEPACSP (SEQ ID NO:16). In some aspects, the signaling domain of CD27 is encoded by a nucleic acid sequence of

(SEQ ID NO: 17)
AGGAGTAAGAGGAGCAGGCTCCTGCACAGTGACTACATGAACATG
ACTCCCCGCCGCCCCGGGCCCACCCGCAAGCATTACCAGCCCTAT
GCCCCACCACGCGACTTCGCAGCCTATCGCTCC

### Inhibitory Domains

[0492] In some embodiments, the vector comprises a nucleic acid sequence that encodes a CAR, e.g., a CAR described herein, and a nucleic acid sequence that encodes an inhibitory molecule comprising: an inhKIR cytoplasmic domain; a transmembrane domain, e.g., a KIR transmembrane domain; and an inhibitor cytoplasmic domain, e.g., an ITIM domain, e.g., an inhKIR ITIM domain. In some embodiments the inhibitory molecule is a naturally occurring inhKIR, or a sequence sharing at least 50, 60, 70, 80, 85, 90, 95, or 99% homology with, or that differs by no more than 1, 2, 3, 4, 5, 6, 7, 8, 9, 10, 15, or 20 residues from, a naturally occurring inhKIR.

[0493] In some embodiments, the nucleic acid sequence that encodes an inhibitory molecule comprises: a SLAM family cytoplasmic domain; a transmembrane domain, e.g., a SLAM family transmembrane domain; and an inhibitor cytoplasmic domain, e.g., a SLAM family domain, e.g., an SLAM family ITIM domain. In some embodiments the inhibitory molecule is a naturally occurring SLAM family member, or a sequence sharing at least 50, 60, 70, 80, 85, 90, 95, or 99% homology with, or that differs by no more than 1, 2, 3, 4, 5, 6, 7, 8, 9, 10, 15, or 20 residues from, a naturally occurring SLAM family member.

[0494] In some embodiments, the vector is an in vitro transcribed vector, e.g., a vector that transcribes RNA of a nucleic acid molecule described herein. In some embodiments, the nucleic acid sequence in the vector further comprises a poly(A) tail, e.g., a poly A tail. In some embodiments, the nucleic acid sequence in the vector further comprises a 3′UTR, e.g., a 3′ UTR described herein, e.g., comprising at least one repeat of a 3′UTR derived from human beta-globulin. In some embodiments, the nucleic acid sequence in the vector further comprises promoter, e.g., a T2A promoter.

### Promoters

[0495] In some embodiments, the vector further comprises a promoter. In some embodiments, the promoter is chosen from an EF-1 promoter, a CMV IE gene promoter, an EF-1α promoter, an ubiquitin C promoter, or a phosphoglycerate kinase (PGK) promoter. In some embodiments, the promoter is an EF-1 promoter. In some embodiments, the EF-1 promoter comprises a sequence of SEQ ID NO: 1.

[0496] In some aspects of the present invention, immune effector cells, e.g., T cells, can be obtained from a unit of blood collected from a subject using any number of techniques known to the skilled artisan, such as Ficoll™ separation. In some aspects, cells from the circulating blood of an individual are obtained by apheresis. The apheresis product typically contains lymphocytes, including T cells, monocytes, granulocytes, B cells, other nucleated white blood cells, red blood cells, and platelets. In some aspects, the cells collected by apheresis may be washed to remove the plasma fraction and, optionally, to suspend the cells in a buffer or medium for subsequent processing steps. In some embodiments, the cells are washed with phosphate buffered saline (PBS). In an alternative embodiment, the wash solution lacks calcium and may lack magnesium or may lack many if not all divalent cations.

TABLE 17
Sequences of various components of CAR
(aa-amino acids, na-nucleic acids that
encodes the corresponding protein)

| SEQ | | |
|---|---|---|
| ID | | |
| NO | description | Sequence |
| 1 | EF-1 promoter | AGCGCACATCGCCCACAGTCCCCGAGAAG |
| | | TTGGGGGGAGGGGTCGGCAATTGAACCGGT |
| | | GCCTAGAGAAGGTGGCGCGGGGTAAACTGG |
| | | GAAAGTGATGTCGTGTACTGGCTCCGCCTT |
| | | TTTCCCGAGGGTGGGGGAGAACCGTATATA |
| | | AGTGCAGTAGTCGCCGTGAACGTTCTTTTT |
| | | CGCAACGGGTTTGCCGCCAGAACACAGGTA |
| | | AGTGCCGTGTGTGGTTCCCGCGGGCCTGGC |
| | | CTCTTTACGGGTTATGGCCCTTGCGTGCCT |
| | | TGAATTACTTCCACCTGGCTGCAGTACGTG |
| | | ATTCTTGATCCCGAGCTTCGGGTTGGAAGT |
| | | GGGTGGGAGAGTTCGAGGCCTTGCGCTTAA |
| | | GGAGCCCCTTCGCCTCGTGCTTGAGTTGAG |
| | | GCCTGGCCTGGGCGCTGGGGCCGCCGCGTG |
| | | CGAATCTGGTGGCACCTTCGCGCCTGTCTC |
| | | GCTGCTTTCGATAAGTCTCTAGCCATTTAA |
| | | AATTTTTGATGACCTGCTGCGACGCTTTTT |
| | | TTCTGGCAAGATAGTCTTGTAAATGCGGGC |
| | | CAAGATCTGCACACTGGTATTTCGGTTTTT |
| | | GGGGCCGCGGGCGGCGACGGGGCCCGTGCG |
| | | TCCCAGCGCACATGTTCGGCGAGGCGGGGC |
| | | CTGCGAGCGCGGCCACCGAGAATCGGACGG |
| | | GGGTAGTCTCAAGCTGGCCGGCCTGCTCTG |
| | | GTGCCTGGCCTCGCGCCGCCGTGTATCGCC |
| | | CCGCCCTGGGCGGCAAGGCTGGCCCGGTCG |
| | | GCACCAGTTGCGTGAGCGGAAAGATGGCCG |
| | | CTTCCCGGCCCTGCTGCAGGGAGCTCAAAA |
| | | TGGAGGACGCGGCGCTCGGGAGAGCGGGCG |
| | | GGTGAGTCACCCACACAAAGGAAAAGGGCC |
| | | TTTCCGTCCTCAGCCGTCGCTTCATGTGAC |
| | | TCCACGGAGTACCGGGCGCCGTCCAGGCAC |
| | | CTCGATTAGTTCTCGAGCTTTTGGAGTACG |
| | | TCGTCTTTAGGTTGGGGGGAGGGGTTTTAT |
| | | GCGATGGAGTTTCCCCACACTGAGTGGGTG |
| | | GAGACTGAAGTTAGGCCAGCTTGGCACTTG |
| | | ATGTAATTCTCCTTGGAATTTGCCCTTTTT |
| | | GAGTTTGGATCTTGGTTCATTCTCAAGCCT |
| | | CAGACAGTGGTTCAAAGTTTTTTTCTTCCA |
| | | TTTCAGGTGTCGTGA |
| 2 | Leader (aa) | MALPVTALLLPLALLLHAARP |
| 3 | Leader (na) | ATGGCCCTGCCTGTGACAGCCCTGCTGCTG |
| | | CCTCTGGCTCTGCTGCTGCATGCCGCTAGA |
| | | CCC |
| 4 | CD 8 hinge | TTTPAPRPPTPAPTIASQPLSLRPEACRPA |
| | (aa) | AGGAVHTRGLDFACD |
| 5 | CD8 hinge (na) | ACCACGACGCCAGCGCCGCGACCACCAACA |
| | | CCGGCGCCCACCATCGCGTCGCAGCCCCTG |
| | | TCCCTGCGCCCAGAGGCGTGCCGGCCAGCG |
| | | GCGGGGGGCGCAGTGCACACGAGGGGGCTG |
| | | GACTTCGCCTGTGAT |
| 6 | Ig4 hinge (aa) | ESKYGPPCPPCPAPEFLGGPSVFLFPPKPK |
| | | DTLMISRTPEVTCVVVDVSQEDPEVQFNWY |
| | | VDGVEVHNAKTKPREEQFNSTYRVVSVLTV |
| | | LHQDWLNGKEYKCKVSNKGLPSSIEKTISK |
| | | AKGQPREPQVYTLPPSQEEMTKNQVSLTCL |
| | | VKGFYPSDIAVEWESNGQPENNYKTTPPV |
| | | LDSDGSFFLYSRLTVDKSRWQEGNVFSCSV |
| | | MHEALHNHYTQKSLSLSLGKM |
| 7 | Ig4 hinge (na) | GAGAGCAAGTACGGCCCTCCCTGCCCCCCT |
| | | TGCCCTGCCCCCGAGTTCCTGGGCGGACCC |
| | | AGCGTGTTCCTGTTCCCCCCCAAGCCCAAG |
| | | GACACCCTGATGATCAGCCGGACCCCCGAG |
| | | GTGACCTGTGTGGTGGTGGACGTGTCCCAG |
| | | GAGGACCCCGAGGTCCAGTTCAACTGGTAC |
| | | GTGGACGGCGTGGAGGTGCACAACGCCAAG |
| | | ACCAAGCCCCGGGAGGAGCAGTTCAATAGC |
| | | ACCTACCGGGTGGTGTCCGTGCTGACCGTG |
| | | CTGCACCAGGACTGGCTGAACGGCAAGGAA |
| | | TACAAGTGTAAGGTGTCCAACAAGGGCCTG |
| | | CCCAGCAGCATCGAGAAAACCATCAGCAAG |
| | | GCCAAGGGCCAGCCTCGGGAGCCCCAGGTG |
| | | TACACCCTGCCCCCTAGCCAAGAGGAGATG |
| | | ACCAAGAACCAGGTGTCCCTGACCTGCCTG |
| | | GTGAAGGGCTTCTACCCCAGCGACATCGCC |
| | | GTGGAGTGGGAGAGCAACGGCCAGCCCGAG |
| | | AACAACTACAAGACCACCCCCCCTGTGCTG |
| | | GACAGCGACGGCAGCTTCTTCCTGTACAGC |
| | | CGGCTGACCGTGGACAAGAGCCGGTGGCAG |
| | | GAGGGCAACGTCTTTAGCTGCTCCGTGATG |
| | | CACGAGGCCCTGCACAACCACTACACCCAG |
| | | AAGAGCCTGAGCCTGTCCCTGGGCAAGATG |
| 8 | IgD hinge (aa) | RWPESPKAQASSVPTAQPQAEGSLAKATTA |
| | | PATTRNTGRGGEEKKKEKEKEEQEERETKT |
| | | PECPSHTQPLGVYLLTPAVQDLWLRDKATF |
| | | TCFVVGSDLKDAHLTWEVAGKVPTGGVEEG |
| | | LLERHSNGSQSQHSRLTLPRSLWNAGTSVT |
| | | CTLNHPSLPPQRLMALREPAAQAPVKLSLN |
| | | LLASSDPPEAASWLLCEVSGFSPPNILLMW |
| | | LEDQREVNTSGFAPARPPPQPGSTTFWAWS |
| | | VLRVPAPPSPQPATYTCVVSHEDSRTLLNA |
| | | SRSLEVSYVTDH |
| 9 | IgD hinge (na) | AGGTGGCCCGAAAGTCCCAAGGCCCAGGCA |
| | | TCTAGTGTTCCTACTGCACAGCCCCAGGCA |
| | | GAAGGCAGCCTAGCCAAAGCTACTACTGCA |
| | | CCTGCCACTACGCGCAATACTGGCCGTGGC |
| | | GGGGAGGAGAAGAAAAAGGAGAAAGAGAAA |
| | | GAAGAACAGGAAGAGAGGGAGACCAAGACC |
| | | CCTGAATGTCCATCCCATACCCAGCCGCTG |
| | | GGCGTCTATCTCTTGACTCCCGCAGTACAG |
| | | GACTTGTGGCTTAGAGATAAGGCCACCTTT |
| | | ACATGTTTCGTCGTGGGCTCTGACCTGAAG |
| | | GATGCCCATTTGACTTGGGAGGTTGCCGGA |
| | | AAGGTACCCACAGGGGGGGTTGAGGAAGGG |
| | | TTGCTGGAGCGCCATTCCAATGGCTCTCAG |
| | | AGCCAGCACTCAAGACTCACCCTTCCGAGA |
| | | TCCCTGTGGAACGCCGGGACCTCTGTCACA |
| | | TGTACTCTAAATCATCCTAGCCTGCCCCCA |
| | | CAGCGTCTGATGGCCCTTAGAGAGCCAGCC |
| | | GCCCAGGCACCAGTTAAGCTTAGCCTGAAT |
| | | CTGCTCGCCAGTAGTGATCCCCCAGAGGCC |
| | | GCCAGCTGGCTCTTATGCGAAGTGTCCGGC |
| | | TTTAGCCCGCCCAACATCTTGCTCATGTGG |
| | | CTGGAGGACCAGCGAGAAGTGAACACCAGC |
| | | GGCTTCGCTCCAGCCCGGCCCCCACCCCAG |
| | | CCGGGTTCTACCACATTCTGGGCCTGGAGT |
| | | GTCTTAAGGGTCCCAGCACCACCTAGCCCC |
| | | CAGCCAGCCACATACACCTGTGTTGTGTCC |
| | | CATGAAGATAGCAGGACCCTGCTAAATGCT |
| | | TCTAGGAGTCTGGAGGTTTCCTACGTGACT |
| | | GACCATT |
| 10 | GS hinge/ | GGGGSGGGGS |
| | linker | |
| | (aa) | |
| 11 | GS hinge/ | GGTGGCGGAGGTTCTGGAGGTGGAGGTTCC |
| | linker | |
| | (na) | |
| 12 | CD8 TM (aa) | IYIWAPLAGTCGVLLLSLVITLYC |
| 13 | CD8 TM (na) | ATCTACATCTGGGCGCCCTTGGCCGGGACT |
| | | TGTGGGGTCCTTCTCCTGTCACTGGTTATC |
| | | ACCCTTTACTGC |
| 14 | 4-1BB | KRGRKKLLYIFKQPFMRPVQTTQEEDGCSC |
| | intracellular | RFPEEEEGGCEL |
| | domain (aa) | |
| 15 | 4-1BB | AAACGGGGCAGAAAGAAACTCCTGTATATA |
| | intracellular | TTCAAACAACCATTTATGAGACCAGTACAA |
| | domain (na) | ACTACTCAAGAGGAAGATGGCTGTAGCTGC |
| | | CGATTTCCAGAAGAAGAAGAAGGAGGATGT |
| | | GAACTG |
| 16 | CD27 (aa) | QRRKYRSNKGESPVEPAEPCRYSCPREEEG |
| | | STIPIQEDYRKPEPACSP |
| 17 | CD27 (na) | AGGAGTAAGAGGAGCAGGCTCCTGCACAGT |
| | | GACTACATGAACATGACTCCCCGCCGCCCC |
| | | GGGCCCACCCGCAAGCATTACCAGCCCTAT |
| | | GCCCCACCACGCGACTTCGCAGCCTATCGC |
| | | TCC |
| 18 | CD3-zeta (aa) | RVKFSRSADAPAYKQGQNQLYNELNLGRRE |
| | | EYDVLDKRRGRDPEMGGKPRRKNPQEGLYN |
| | | ELQKDKMAEAYSEIGMKGERRRGKGHDGLY |
| | | QGLSTATKDTYDALHMQALPPR |
| 19 | CD3-zeta (na) | AGAGTGAAGTTCAGCAGGAGCGCAGACGCC |
| | | CCCGCGTACAAGCAGGGCCAGAACCAGCTC |
| | | TATAACGAGCTCAATCTAGGACGAAGAGAG |
| | | GAGTACGATGTTTTGGACAAGAGACGTGGC |
| | | CGGGACCCTGAGATGGGGGGAAAGCCGAGA |
| | | AGGAAGAACCCTCAGGAAGGCCTGTACAAT |
| | | GAACTGCAGAAAGATAAGATGGCGGAGGCC |
| | | TACAGTGAGATTGGGATGAAAGGCGAGCGC |
| | | CGGAGGGGCAAGGGGCACGATGGCCTTTAC |
| | | CAGGGTCTCAGTACAGCCACCAAGGACACC |
| | | TACGACGCCCTTCACATGCAGGCCCTGCCC |
| | | CCTCGC |
| 20 | CD3-zeta (aa) | RVKFSRSADAPAYQQGQNQLYNELNLGRRE |
| | | EYDVLDKRRGRDPEMGGKPRRKNPQEGLYN |
| | | ELQKDKMAEAYSEIGMKGERRRGKGHDGLY |
| | | QGLSTATKDTYDALHMQALPPR |
| 21 | CD3-zeta (na) | AGAGTGAAGTTCAGCAGGAGCGCAGACGCC |
| | | CCCGCGTACCAGCAGGGCCAGAACCAGCTC |
| | | TATAACGAGCTCAATCTAGGACGAAGAGAG |
| | | GAGTACGATGTTTTGGACAAGAGACGTGGC |
| | | CGGGACCCTGAGATGGGGGGAAAGCCGAGA |
| | | AGGA |
| | | AGAACCCTCAGGAAGGCCTGTACAATGAAC |
| | | TGCAGAAAGATAAGATGGCGG |
| | | AGGCCTACAGTGAGATTGGGATGAAAGGCG |
| | | AGCGCCGGAGGGGCAAGGGGC |
| | | ACGATGGCCTTTACCAGGGTCTCAGTACAG |
| | | CCACCAAGGACACCTACGACGCCCTTCACA |
| | | TGCAGGCCCTGCCCCCTCGC |
| 22 | linker | GGGGS |
| 23 | linker | GGTGGCGGAGGTTCTGGAGGTGGAGGTTCC |
| 24 | PD-1 | Pgwfldspdrpwnpptfspallvvtegdna |
| | extracellular | tftcsfsntsesfvlnwyrmspsnqtdkla |
| | domain (aa) | afpedrsqpgqdcrfrvtqlpngrdfhmsv |
| | | vrarrndsgtylegaislapkaqikeslra |
| | | elrvterraevptahpspsprpagqfqtlv |
| 25 | PD-1 | Cccggatggtttctggactctccggatcgc |
| | extracellular | ccgtggaatcccccaaccttctcaccggca |
| | domain (na) | ctcttggttgtgactgagggcgataatgcg |
| | | accttcacgtgctcgttctccaacacctcc |
| | | gaatcattcgtgctgaactggtaccgcatg |
| | | agcccgtcaaaccagaccgacaagctcgcc |
| | | gcgtttccggaagatcggtcgcaaccggga |
| | | caggattgtcggttccgcgtgactcaactg |
| | | ccgaatggcagagacttccacatgagcgtg |
| | | gtccgcgctaggcgaaacgactccgggacc |
| | | tacctgtgcggagccatctcgctggcgcct |
| | | aaggcccaaatcaaagagagcttgagggcc |
| | | gaactgagagtgaccgagcgcagagctgag |
| | | gtgccaactgcacatccatccccatcgcct |
| | | cggcctgcggggcagtttcagaccctggtc |
| 26 | PD-1 CAR (aa) | Malpvtalllplalllhaarppgwfldspd |
| | with signal | rpwnpptfspallvvtegdnatftcsfsnt |
| | | sesfvlnwyrmspsnqtdklaafpedrsqp |
| | | gqdcrfrvtqlpngrdfhmsvvrarrndsg |
| | | tylcgaislapkaqikeslraelrvterra |
| | | evptahpspsprpagqfqtlvtttpaprpp |
| | | tpaptiasqplslrpeacrpaaggavhtrg |
| | | ldfacdiyiwaplagtcgvlllslvitlyc |
| | | krgrkkllyifkqpfmrpvqttqeedgcsc |
| | | rfpeeeeggcelrvkfsrsadapaykqgqn |
| | | qlynelnlgrreeydvldkrrgrdpemggk |
| | | prrknpqeglynelqkdkmaeayseigmkg |
| | | errrgkghdglyqglstatkdtydaIhmqa |
| | | lppr |
| 27 | PD-1 CAR (na) | Atggccctccctgtcactgccctgcttctc |
| | | cccctcgcactcctgctccacgccgctaga |
| | | ccacccggatggtttctggactctccggat |
| | | cgcccgtggaatcccccaaccttctcaccg |
| | | gcactcttggttgtgactgagggcgataat |
| | | gcgaccttcacgtgctcgttctccaacacc |
| | | tccgaatcattcgtgctgaactggtaccgc |
| | | atgagcccgtcaaaccagaccgacaagctc |
| | | gccgcgtttccggaagatcggtcgcaaccg |
| | | ggacaggattgtcggttccgcgtgactcaa |
| | | ctgccgaatggcagagacttccacatgagc |
| | | gtggtccgcgctaggcgaaacgactccggg |
| | | acctacctgtgcggagccatctcgctggcg |
| | | cctaaggcccaaatcaaagagagcttgagg |
| | | gccgaactgagagtgaccgagcgcagagct |
| | | gaggtgccaactgcacatccatccccatcg |
| | | cctcggcctgcggggcagtttcagaccctg |
| | | gtcacgaccactccggcgccgcgcccaccg |
| | | actccggccccaactatcgcgagccagccc |
| | | ctgtcgctgaggccggaagcatgccgccct |
| | | gccgccggaggtgctgtgcatacccgggga |
| | | ttggacttcgcatgcgacatctacatttgg |
| | | gctcctctcgccggaacttgtggcgtgctc |
| | | cttctgtccctggtcatcaccctgtactgc |
| | | aagcggggtcggaaaaagcttctgtacatt |
| | | ttcaagcagcccttcatgaggcccgtgcaa |
| | | accacccaggaggaggacggttgctcctgc |
| | | cggttccccgaagaggaagaaggaggttgc |
| | | gagctgcgcgtgaagttctcccggagcgcc |
| | | gacgcccccgcctataagcagggccagaac |
| | | cagctgtacaacgaactgaacctgggacgg |
| | | cgggaagagtacgatgtgctggacaagcgg |
| | | cgcggccgggaccccgaaatggggggaagc |
| | | ctagaagaaagaaccctcaggaaggcctgt |
| | | ataacgagctgcagaaggacaagatggccg |
| | | aggcctactccgaaattgggatgaagggag |
| | | agcggcggaggggaaaggggcacgacggcc |
| | | tgtaccaaggactgtccaccgccaccaagg |
| | | acacatacgatgccctgcacatgcaggccc |
| | | ttccccctcgc |
| 28 | linker | (Gly-Gly-Gly-Ser)n, |
| | | where n = 1-10 |
| 29 | linker | (Gly4 Ser)4 |
| 30 | linker | (Gly4 Ser)3 |
| 31 | linker | (Gly3Ser) |
| 39 | PD1 CAR (aa) | Pgwfldspdrpwnpptfspallvvtegdna |
| | | tftcsfsntsesfvlnwyrmspsnqtdkla |
| | | afpedrsqpgqderfrvtqlpngrdfhmsv |
| | | vrarrndsgtylegaislapkaqikeslra |
| | | elrvterraevptahpspsprpagqfqtlv |
| | | tttpaprpptpaptiasqplslrpeacrpa |
| | | aggavhtrgldfacdiyiwaplagtcgvll |
| | | lslvitlyckrgrkkllyifkqpfmrpvqt |
| | | tqeedgcscrfpeeeeggcelrvkfsrsad |
| | | apaykqgqnqlynelnlgrreeydvldkrr |
| | | grdpemggkprrknpqeglynelqkdkmae |
| | | ayseigmkgerrrgkghdglyqglstatkd |
| | | tydalhmqalppr |

### Methods of Manufacture

[0497] Lentiviral vectors described herein (e.g., those made using a method described herein), can be used, e.g., in the in vitro manufacture of CAR-T cells.

[0498] CARTs disclosed herein can be manufactured ex vivo by any known methods in the art. For example, methods described in WO2012/079000, or WO2020/047452 (both incorporated herein by reference) may be used. CARTs disclosed herein can also be manufactured in vivo by any known methods in the art. For example, methods described in WO2020/176397 (incorporated herein by reference). An immune effector cell (e.g., T cell or NK cell) may express one CAR, or two or more CARs.

[0499] In some embodiments, the methods disclosed herein may manufacture immune effector cells engineered to express one or more CARs in less than 24 hours. Without wishing to be bound by theory, the methods provided herein preserve the undifferentiated phenotype of T cells, such as naive T cells, during the manufacturing process. These CAR-expressing cells with an undifferentiated phenotype may persist longer and/or expand better in vivo after infusion. In some embodiments, CART cells produced by the manufacturing methods provided herein comprise a higher percentage of stem cell memory T cells, compared to CART cells produced by the traditional manufacturing process, e.g., as measured using scRNA-seq.

[0500] In some embodiments, CART cells produced by the manufacturing methods provided herein comprise a higher percentage of effector T cells, compared to CART cells produced by the traditional manufacturing process, e.g., as measured using scRNA-seq. In some embodiments, CART cells produced by the manufacturing methods provided herein better preserve the sternness of T cells, compared to CART cells produced by the traditional manufacturing process, e.g., as measured using scRNA-seq. In some embodiments, CART cells produced by the manufacturing methods provided herein show a lower level of hypoxia, compared to CART cells produced by the traditional manufacturing process, e.g., as measured using scRNA-seq. In some embodiments, CART cells produced by the manufacturing methods provided herein show a lower level of autophagy, compared to CART cells produced by the traditional manufacturing process, e.g., as measured using scRNA-seq. In some embodiments, the immune effector cells are engineered to comprise a nucleic acid molecule encoding one or more CARs disclosed herein.

[0501] In some embodiments, the methods disclosed herein do not involve using a bead, such as Dynabeads® (for example, CD3/CD28 Dynabeads®), and do not involve a de-beading step. In some embodiments, the CART cells manufactured by the methods disclosed herein may be administered to a subject with minimal ex vivo expansion, for example, less than 1 day, less than 12 hours, less than 8 hours, less than 6 hours, less than 4 hours, less than 3 hours, less than 2 hours, less than 1 hour, or no ex vivo expansion. Accordingly, the methods described herein provide a fast manufacturing process of making improved CAR-expressing cell products for use in treating a disease in a subject.

[0502] In some embodiments, the present disclosure provides methods of making a population of cells (for example, T cells) that express a chimeric antigen receptor (CAR) comprising: (i) contacting a population of cells (for example, T cells, for example, T cells isolated from a frozen or fresh leukapheresis product) with an agent that stimulates a CD3/TCR complex and/or an agent that stimulates a costimulatory molecule on the surface of the cells; (ii) contacting the population of cells (for example, T cells) with a nucleic acid molecule(s) (for example, a DNA or RNA molecule) encoding the CAR(s), thereby providing a population of cells (for example, T cells) comprising the nucleic acid molecule, and (iii) harvesting the population of cells (for example, T cells) for storage (for example, reformulating the population of cells in cryopreservation media) or administration, wherein: (a) step (ii) is performed together with step (i) or no later than 20 hours after the beginning of step (i), for example, no later than 12, 13, 14, 15, 16, 17, or 18 hours after the beginning of step (i), for example, no later than 18 hours after the beginning of step (i), and step (iii) is performed no later than 26 hours after the beginning of step (i), for example, no later than 22, 23, or 24 hours after the beginning of step (i), for example, no later than 24 hours after the beginning of step (i); (b) step (ii) is performed together with step (i) or no later than 20 hours after the beginning of step (i), for example, no later than 12, 13, 14, 15, 16, 17, or 18 hours after the beginning of step (i), for example, no later than 18 hours after the beginning of step (i), and step (iii) is performed no later than 30 hours after the beginning of step (ii), for example, no later than 22, 23, 24, 25, 26, 27, 28, 29, or 30 hours after the beginning of step (ii); or (c) the population of cells from step (iii) are not expanded, or expanded by no more than 5, 10, 15, 20, 25, 30, 35, or 40%, for example, no more than 10%, for example, as assessed by the number of living cells, compared to the population of cells at the beginning of step (i). In some embodiments, the nucleic acid molecule in step (ii) is a DNA molecule. In some embodiments, the nucleic acid molecule in step (ii) is an RNA molecule. In some embodiments, the nucleic acid molecule in step (ii) is on a viral vector, for example, a viral vector chosen from a lentivirus vector, an adenoviral vector, or a retrovirus vector. In some embodiments, the nucleic acid molecule in step (ii) is on a non-viral vector. In some embodiments, the nucleic acid molecule in step (ii) is on a plasmid. In some embodiments, the nucleic acid molecule in step (ii) is not on any vector. In some embodiments, step (ii) comprises transducing the population of cells (for example, T cells) a viral vector(s) comprising a nucleic acid molecule encoding the CAR(s).

[0503] In some embodiments, the population of cells (for example, T cells) is collected from an apheresis sample (for example, a leukapheresis sample) from a subject.

[0504] In some embodiments, the apheresis sample (for example, a leukapheresis sample) is collected from the subject and shipped as a frozen sample (for example, a cryopreserved sample) to a cell manufacturing facility. Then the frozen apheresis sample is thawed, and T cells (for example, CD4+ T cells and/or CD8+ T cells) are selected from the apheresis sample, for example, using a cell sorting machine (for example, a CliniMACS® Prodigy® device). The selected T cells (for example, CD4+ T cells and/or CD8+ T cells) are then seeded for CART manufacturing using the activation process described herein. In some embodiments, the selected T cells (for example, CD4+ T cells and/or CD8+ T cells) undergo one or more rounds of freeze-thaw before being seeded for CART manufacturing.

[0505] In some embodiments, the apheresis sample (for example, a leukapheresis sample) is collected from the subject and shipped as a fresh product (for example, a product that is not frozen) to a cell manufacturing facility. T cells (for example, CD4+ T cells and/or CD 8+ T cells) are selected from the apheresis sample, for example, using a cell sorting machine (for example, a CliniMACS® Prodigy® device). The selected T cells (for example, CD4+ T cells and/or CD8+ T cells) are then seeded for CART manufacturing using the activation process described herein. In some embodiments, the selected T cells (for example, CD4+ T cells and/or CD8+ T cells) undergo one or more rounds of freeze-thaw before being seeded for CART manufacturing.

[0506] In some embodiments, the apheresis sample (for example, a leukapheresis sample) is collected from the subject. T cells (for example, CD4+ T cells and/or CD8+ T cells) are selected from the apheresis sample, for example, using a cell sorting machine (for example, a CliniMACS® Prodigy® device). The selected T cells (for example, CD4+ T cells and/or CD8+ T cells) are then shipped as a frozen sample (for example, a cryopreserved sample) to a cell manufacturing facility. The selected T cells (for example, CD4+ T cells and/or CD8+ T cells) are later thawed and seeded for CART manufacturing using the activation process described herein.

[0507] In some embodiments, cells (for example, T cells) are contacted with anti-CD3 and anti-CD28 antibodies for, for example, 12 hours, followed by transduction with a vector (for example, a lentiviral vector) (e.g. one or more vectors) encoding a CAR (e.g. one or more CARs). 24 hours after culture initiation, the cells are washed and formulated for storage or administration.

[0508] Without wishing to be bound by theory, brief CD3 and CD28 stimulation may promote efficient transduction of self-renewing T cells. Compared to traditional CART manufacturing approaches, the activation process provided herein does not involve prolonged ex vivo expansion. Similar to the cytokine process, the activation process provided herein also preserves undifferentiated T cells during CART manufacturing.

[0509] In some embodiments, the population of cells is contacted with an agent that stimulates a CD3/TCR complex and/or an agent that stimulates a costimulatory molecule on the surface of the cells.

[0510] In some embodiments, the agent that stimulates a CD3/TCR complex is an agent that stimulates CD3. In some embodiments, the agent that stimulates a costimulatory molecule is an agent that stimulates CD28, ICOS, CD27, HVEM, LIGHT, CD40, 4-1BB, 0X40, DR3, GITR, CD30, TIMI, CD2, CD226, or any combination thereof. In some embodiments, the agent that stimulates a costimulatory molecule is an agent that stimulates CD28. In some embodiments, the agent that stimulates a CD3/TCR complex is chosen from an antibody (for example, a single-domain antibody (for example, a heavy chain variable domain antibody), a peptibody, a Fab fragment, or a scFv), a small molecule, or a ligand (for example, a naturally-existing, recombinant, or chimeric ligand). In some embodiments, the agent that stimulates a CD3/TCR complex is an antibody. In some embodiments, the agent that stimulates a CD3/TCR complex is an anti-CD3 antibody. In some embodiments, the agent that stimulates a costimulatory molecule is chosen from an antibody (for example, a single-domain antibody (for example, a heavy chain variable domain antibody), a peptibody, a Fab fragment, or a scFv), a small molecule, or a ligand (for example, a naturally-existing, recombinant, or chimeric ligand). In some embodiments, the agent that stimulates a costimulatory molecule is an antibody. In some embodiments, the agent that stimulates a costimulatory molecule is an anti-CD28 antibody. In some embodiments, the agent that stimulates a CD3/TCR complex or the agent that stimulates a costimulatory molecule does not comprise a bead. In some embodiments, the agent that stimulates a CD3/TCR complex comprises an anti-CD3 antibody covalently attached to a colloidal polymeric nanomatrix. In some embodiments, the agent that stimulates a costimulatory molecule comprises an anti-CD28 antibody covalently attached to a colloidal polymeric nanomatrix. In some embodiments, the agent that stimulates a CD3/TCR complex and the agent that stimulates a costimulatory molecule comprise T Cell TransAct™.

[0511] In some embodiments, the matrix comprises or consists of a polymeric, for example, biodegradable or biocompatible inert material, for example, which is non-toxic to cells. In some embodiments, the matrix is composed of hydrophilic polymer chains, which obtain maximal mobility in aqueous solution due to hydration of the chains. In some embodiments, the mobile matrix may be of collagen, purified proteins, purified peptides, polysaccharides, glycosaminoglycans, or extracellular matrix compositions. A polysaccharide may include for example, cellulose ethers, starch, gum arabic, agarose, dextran, chitosan, hyaluronic acid, pectins, xanthan, guar gum or alginate. Other polymers may include polyesters, polyethers, poly acrylates, polyacrylamides, polyamines, polyethylene imines, polyquaternium polymers, polyphosphazenes, polyvinylalcohols, poly vinylacetates, polyvinylpyrrolidones, block copolymers, or polyurethanes. In some embodiments, the mobile matrix is a polymer of dextran.

[0512] In some embodiments, the population of cells is contacted with a nucleic acid molecule (e.g. one or more nucleic acid molecules) encoding a CAR (e.g. one or more CARs). In some embodiments, the population of cells is transduced with a DNA molecule (e.g. one or more DNA molecules) encoding a CAR (e.g. one or more CARs).

[0513] In some embodiments, in the case of a co-transduction of two nucleic acid molecules (e.g., lentiviral vectors), each of which encodes a CAR disclosed herein, each of the vectors containing nucleic acid molecules encoding the CAR can be added to the reaction mixture (e.g., containing a cell population) at a different multiplicity of infection (MOI).

[0514] Without wishing to be bound by theory, it is believed that, in some embodiments, using different MOIs for the vectors containing nucleic acid molecules which encode distinct CAR molecules may affect the final composition of the cellular population. For example, in the case of a co transduction of a lentiviral vector encoding one CAR and a lentiviral vector encoding another CAR targeting a different target, different MOIs can be used to maximize the percent of preferred mono CART cells and dual CART cells, while resulting in fewer undesired mono CART cells and untransduced cells.

[0515] The precise MOI used for each vector can be adjusted or determined based on a number of factors, including, but not limited to, properties of the batch of viral vector, characteristics of the cells to be transduced, and transduction efficiency. In some embodiments, contacting the population of cells with the nucleic acid molecule(s) encoding the CAR(s) occurs simultaneously with contacting the population of cells with the agent that stimulates a CD3/TCR complex and/or the agent that stimulates a costimulatory molecule on the surface of the cells described above. In some embodiments, contacting the population of cells with the nucleic acid molecule(s) encoding the CAR(s) occurs no later than 30, 29, 28, 27, 26, 25, 24, 23, 22, 21, 20, 19, 18, 17, 16, 15, 14, 13, 12, 11, 10, 9, 8, 7, 6, 5, 4, 3, 2, 1, or 0.5 hours after the beginning of contacting the population of cells with the agent that stimulates a CD3/TCR complex and/or the agent that stimulates a costimulatory molecule on the surface of the cells described above. In some embodiments, contacting the population of cells with the nucleic acid molecule(s) encoding the CAR(s) occurs no later than 20 hours after the beginning of contacting the population of cells with the agent that stimulates a CD3/TCR complex and/or the agent that stimulates a costimulatory molecule on the surface of the cells described above. In some embodiments, contacting the population of cells with the nucleic acid molecule(s) encoding the CAR(s) occurs no later than 19 hours after the beginning of contacting the population of cells with the agent that stimulates a CD3/TCR complex and/or the agent that stimulates a costimulatory molecule on the surface of the cells described above. In some embodiments, contacting the population of cells with the nucleic acid molecule(s) encoding the CAR(s) occurs no later than 18 hours after the beginning of contacting the population of cells with the agent that stimulates a CD3/TCR complex and/or the agent that stimulates a costimulatory molecule on the surface of the cells described above. In some embodiments, contacting the population of cells with the nucleic acid molecule(s) encoding the CAR(s) occurs no later than 17 hours after the beginning of contacting the population of cells with the agent that stimulates a CD3/TCR complex and/or the agent that stimulates a costimulatory molecule on the surface of the cells described above.

[0516] In some embodiments, contacting the population of cells with the nucleic acid molecule(s) encoding the CAR(s) occurs no later than 16 hours after the beginning of contacting the population of cells with the agent that stimulates a CD3/TCR complex and/or the agent that stimulates a costimulatory molecule on the surface of the cells described above. In some embodiments, contacting the population of cells with the nucleic acid molecule(s) encoding the CAR(s) occurs no later than 15 hours after the beginning of contacting the population of cells with the agent that stimulates a CD3/TCR complex and/or the agent that stimulates a costimulatory molecule on the surface of the cells described above. In some embodiments, contacting the population of cells with the nucleic acid molecule(s) encoding the CAR(s) occurs no later than 14 hours after the beginning of contacting the population of cells with the agent that stimulates a CD3/TCR complex and/or the agent that stimulates a costimulatory molecule on the surface of the cells described above. In some embodiments, contacting the population of cells with the nucleic acid molecule(s) encoding the CAR(s) occurs no later than 14 hours after the beginning of contacting the population of cells with the agent that stimulates a CD3/TCR complex and/or the agent that stimulates a costimulatory molecule on the surface of the cells described above. In some embodiments, contacting the population of cells with the nucleic acid molecule(s) encoding the CAR(s) occurs no later than 13 hours after the beginning of contacting the population of cells with the agent that stimulates a CD3/TCR complex and/or the agent that stimulates a costimulatory molecule on the surface of the cells described above. In some embodiments, contacting the population of cells with the nucleic acid molecule(s) encoding the CAR(s) occurs no later than 12 hours after the beginning of contacting the population of cells with the agent that stimulates a CD3/TCR complex and/or the agent that stimulates a costimulatory molecule on the surface of the cells described above. In some embodiments, contacting the population of cells with the nucleic acid molecule(s) encoding the CAR(s) occurs no later than 11 hours after the beginning of contacting the population of cells with the agent that stimulates a CD3/TCR complex and/or the agent that stimulates a costimulatory molecule on the surface of the cells described above. In some embodiments, contacting the population of cells with the nucleic acid molecule(s) encoding the CAR(s) occurs no later than 10 hours after the beginning of contacting the population of cells with the agent that stimulates a CD3/TCR complex and/or the agent that stimulates a costimulatory molecule on the surface of the cells described above. In some embodiments, contacting the population of cells with the nucleic acid molecule(s) encoding the CAR(s) occurs no later than 9 hours after the beginning of contacting the population of cells with the agent that stimulates a CD3/TCR complex and/or the agent that stimulates a costimulatory molecule on the surface of the cells described above. In some embodiments, contacting the population of cells with the nucleic acid molecule(s) encoding the CAR(s) occurs no later than 8 hours after the beginning of contacting the population of cells with the agent that stimulates a CD3/TCR complex and/or the agent that stimulates a costimulatory molecule on the surface of the cells described above. In some embodiments, contacting the population of cells with the nucleic acid molecule(s) encoding the CAR(s) occurs no later than 7 hours after the beginning of contacting the population of cells with the agent that stimulates a CD3/TCR complex and/or the agent that stimulates a costimulatory molecule on the surface of the cells described above. In some embodiments, contacting the population of cells with the nucleic acid molecule(s) encoding the CAR(s) occurs no later than 6 hours after the beginning of contacting the population of cells with the agent that stimulates a CD3/TCR complex and/or the agent that stimulates a costimulatory molecule on the surface of the cells described above. In some embodiments, contacting the population of cells with the nucleic acid molecule(s) encoding the CAR(s) occurs no later than 5 hours after the beginning of contacting the population of cells with the agent that stimulates a CD3/TCR complex and/or the agent that stimulates a costimulatory molecule on the surface of the cells described above. In some embodiments, contacting the population of cells with the nucleic acid molecule(s) encoding the CAR(s) occurs no later than 4 hours after the beginning of contacting the population of cells with the agent that stimulates a CD3/TCR complex and/or the agent that stimulates a costimulatory molecule on the surface of the cells described above. In some embodiments, contacting the population of cells with the nucleic acid molecule(s) encoding the CAR(s) occurs no later than 3 hours after the beginning of contacting the population of cells with the agent that stimulates a CD3/TCR complex and/or the agent that stimulates a costimulatory molecule on the surface of the cells described above. In some embodiments, contacting the population of cells with the nucleic acid molecule encoding the CAR(s) occurs no later than 2 hours after the beginning of contacting the population of cells with the agent that stimulates a CD3/TCR complex and/or the agent that stimulates a costimulatory molecule on the surface of the cells described above. In some embodiments, contacting the population of cells with the nucleic acid molecule(s) encoding the CAR(s) occurs no later than 1 hour after the beginning of contacting the population of cells with the agent that stimulates a CD3/TCR complex and/or the agent that stimulates a costimulatory molecule on the surface of the cells described above. In some embodiments, contacting the population of cells with the nucleic acid molecule(s) encoding the CAR(s) occurs no later than 30 minutes after the beginning of contacting the population of cells with the agent that stimulates a CD3/TCR complex and/or the agent that stimulates a costimulatory molecule on the surface of the cells described above.

[0517] In some embodiments, the population of cells is harvested for storage or administration.

[0518] In some embodiments, the population of cells is harvested for storage or administration no later than 72, 60, 48, 36, 32, 31, 30, 29, 28, 27, 26, 25, 24, 23, 22, 21, 20, 19, or 18 hours after the beginning of contacting the population of cells with the agent that stimulates a CD3/TCR complex and/or the agent that stimulates a costimulatory molecule on the surface of the cells described above. In some embodiments, the population of cells is harvested for storage or administration no later than 26 hours after the beginning of contacting the population of cells with the agent that stimulates a CD3/TCR complex and/or the agent that stimulates a costimulatory molecule on the surface of the cells described above. In some embodiments, the population of cells is harvested for storage or administration no later than 25 hours after the beginning of contacting the population of cells with the agent that stimulates a CD3/TCR complex and/or the agent that stimulates a costimulatory molecule on the surface of the cells described above. In some embodiments, the population of cells is harvested for storage or administration no later than 24 hours after the beginning of contacting the population of cells with the agent that stimulates a CD3/TCR complex and/or the agent that stimulates a costimulatory molecule on the surface of the cells described above. In some embodiments, the population of cells is harvested for storage or administration no later than 23 hours after the beginning of contacting the population of cells with the agent that stimulates a CD3/TCR complex and/or the agent that stimulates a costimulatory molecule on the surface of the cells described above. In some embodiments, the population of cells is harvested for storage or administration no later than 22 hours after the beginning of contacting the population of cells with the agent that stimulates a CD3/TCR complex and/or the agent that stimulates a costimulatory molecule on the surface of the cells described above.

[0519] In some embodiments, the population of cells is not expanded ex vivo.

[0520] In some embodiments, the population of cells is expanded by no more than 5, 6, 7, 8, 9, 10, 11, 12, 13, 14, 15, 16, 17, 18, 19, 20, 25, 30, 35, 40, 45, 50, 55, or 60%, for example, as assessed by the number of living cells, compared to the population of cells before it is contacted with the agent that stimulates a CD3/TCR complex and/or the agent that stimulates a costimulatory molecule on the surface of the cells described above. In some embodiments, the population of cells is expanded by no more than 5%, for example, as assessed by the number of living cells, compared to the population of cells before it is contacted with the agent that stimulates a CD3/TCR complex and/or the agent that stimulates a costimulatory molecule on the surface of the cells described above. In some embodiments, the population of cells is expanded by no more than 10%, for example, as assessed by the number of living cells, compared to the population of cells before it is contacted with the agent that stimulates a CD3/TCR complex and/or the agent that stimulates a costimulatory molecule on the surface of the cells described above. In some embodiments, the population of cells is expanded by no more than 15%, for example, as assessed by the number of living cells, compared to the population of cells before it is contacted with the agent that stimulates a CD3/TCR complex and/or the agent that stimulates a costimulatory molecule on the surface of the cells described above. In some embodiments, the population of cells is expanded by no more than 20%, for example, as assessed by the number of living cells, compared to the population of cells before it is contacted with the agent that stimulates a CD3/TCR complex and/or the agent that stimulates a costimulatory molecule on the surface of the cells described above. In some embodiments, the population of cells is expanded by no more than 25%, for example, as assessed by the number of living cells, compared to the population of cells before it is contacted with the agent that stimulates a CD3/TCR complex and/or the agent that stimulates a costimulatory molecule on the surface of the cells described above. In some embodiments, the population of cells is expanded by no more than 30%, for example, as assessed by the number of living cells, compared to the population of cells before it is contacted with the agent that stimulates a CD3/TCR complex and/or the agent that stimulates a costimulatory molecule on the surface of the cells described above. In some embodiments, the population of cells is expanded by no more than 35%, for example, as assessed by the number of living cells, compared to the population of cells before it is contacted with the agent that stimulates a CD3/TCR complex and/or the agent that stimulates a costimulatory molecule on the surface of the cells described above. In some embodiments, the population of cells is expanded by no more than 40%, for example, as assessed by the number of living cells, compared to the population of cells before it is contacted with the agent that stimulates a CD3/TCR complex and/or the agent that stimulates a costimulatory molecule on the surface of the cells described above.

[0521] In some embodiments, the population of cells is expanded by no more than 1, 1.5, 2, 2.5, 3, 3.5, 4, 4.5, 5, 6, 7, 8, 9, 10, 11, 12, 16, 20, 24, 36, or 48 hours, for example, as assessed by the number of living cells, compared to the population of cells before it is contacted with the one or more cytokines described above.

[0522] In some embodiments, the activation process is conducted in serum free cell media. In some embodiments, the activation process is conducted in cell media comprising one or more cytokines chosen from: IL-2, IL-15 (for example, hetIL-15 (IL15/sIL-15Ra)), or IL-6 (for example, IL-6/sIL-6Ra). In some embodiments, hetIL-15 comprises the amino acid sequence of NWVNVISDLKKIEDLIQSMHIDATLYTESDVHPSCKVTAMKCFLLELQVISLESGDASIHDTV ENLIILANNSLSSNGNVTESGCKECEELEEKNIKEFLQSFVHIVQMFINTSITCPPPMSVEHADI WVKSYSLYSRERYICNSGFKRKAGTSSLTECVLNKATNVAHWTTPSLKCIRDPALVHQRPAP PSTVTTAGVTPQPESL SPSGKEPAASSPSSNNTAATTAAIVPGSQLMPSKSPSTGTTEISSHESS HGTPSQTTAKNWELTASASHQPPGVYPQG (SEQ ID NO: 309). In some embodiments, hetIL-15 comprises an amino acid sequence having at least about 70, 75, 80, 85, 90, 95, or 99% identity to SEQ ID NO: 309.

[0523] In some embodiments, the activation process is conducted in cell media comprising a LSD1 inhibitor.

[0524] In some embodiments, the activation process is conducted in cell media comprising a MALT1 inhibitor. In some embodiments, the serum free cell media comprises a serum replacement. In some embodiments, the serum replacement is CTS™ Immune Cell Serum Replacement (ICSR). In some embodiments, the level of ICSR can be, for example, up to 5%, for example, about 1%, 2%, 3%, 4%, or 5%. Without wishing to be bound by theory, using cell media, for example, Rapid Media shown in Table 21 or Table 25, comprising ICSR, for example, 2% ICSR, may improve cell viability during a manufacture process described herein.

[0525] In some embodiments, the present disclosure provides methods of making a population of cells (for example, T cells) that express a chimeric antigen receptor (CAR) comprising: (a) providing an apheresis sample (for example, a fresh or cryopreserved leukapheresis sample) collected from a subject; (b) selecting T cells from the apheresis sample (for example, using negative selection, positive selection, or selection without beads); (c) seeding isolated T cells at, for example, 1×10⁶ to 1×10⁷ cells/mL; (d) contacting T cells with an agent that stimulates T cells, for example, an agent that stimulates a CD3/TCR complex and/or an agent that stimulates a costimulatory molecule on the surface of the cells (for example, contacting T cells with anti-CD3 and/or anti-CD28 antibody, for example, contacting T cells with TransAct); (e) contacting T cells with a nucleic acid molecule(s) (for example, a DNA or RNA molecule) encoding the CAR(s) (for example, contacting T cells with a virus comprising a nucleic acid molecule(s) encoding the CAR(s)) for, for example, 6-48 hours, for example, 20-28 hours; and (f) washing and harvesting T cells for storage (for example, reformulating T cells in cryopreservation media) or administration. In some embodiments, step (f) is performed no later than 30 hours after the beginning of step (d) or (e), for example, no later than 22, 23, 24, 25, 26, 27, 28, 29, or 30 hours after the beginning of step (d) or (e).

[0526] In some embodiments, provided herein is a population of cells (for example, immune effector cells, for example, T cells or NK cells) made by any of the manufacturing processes described herein.

[0527] In some embodiments, the percentage of naive cells, for example, naive T cells, for example, CD45RA+CD45RO− CCR7+ T cells, in the population of cells at the end of the manufacturing process (for example, at the end of the cytokine process or the activation process described herein) (1) is the same as, (2) differs, for example, by no more than 4, 5, 6, 7, 8, 9, 10, 11, 12, 13, 14, or 15%, from, or (3) is increased, for example, by at least 5, 6, 7, 8, 9, 10, 11, 12, 13, 14, 15, 16, 17, 18, 19, 20, 21, 22, 23, 24, or 25%, as compared to, the percentage of naive cells, for example, naive T cells, for example, CD45RA+CD45RO− CCR7+ cells, in the population of cells at the beginning of the manufacturing process (for example, at the beginning of the cytokine process or the activation process described herein). In some embodiments, the population of cells at the end of the manufacturing process (for example, at the end of the cytokine process or the activation process described herein) shows a higher percentage of naive cells, for example, naive T cells, for example, CD45RA+CD45RO− CCR7+ T cells (for example, at least 5, 6, 7, 8, 9, 10, 11, 12, 13, 14, 15, 16, 17, 18, 19, 20, 25, 30, 35, 40, 45, or 50% higher), compared with cells made by an otherwise similar method which lasts, for example, more than 26 hours (for example, which lasts more than 5, 6, 7, 8, 9, 10, 11, or 12 days) or which involves expanding the population of cells in vitro for, for example, more than 3 days (for example, expanding the population of cells in vitro for 3, 4, 5, 6, 7, 8, 9, 10, 11, 12, 13, 14, or 15 days).

[0528] In some embodiments, the percentage of naive cells, for example, naive T cells, for example, CD45RA+CD45RO− CCR7+ T cells, in the population of cells at the end of the manufacturing process (for example, at the end of the cytokine process or the activation process described herein) is not less than 20, 25, 30, 35, 40, 45, 50, 55, or 60%.

[0529] In some embodiments, the percentage of central memory cells, for example, central memory T cells, for example, CD95+ central memory T cells, in the population of cells at the end of the manufacturing process (for example, at the end of the cytokine process or the activation process described herein) (1) is the same as, (2) differs, for example, by no more than 4, 5, 6, 7, 8, 9, 10, 11, 12, 13, 14, or 15% from, or (3) is decreased, for example, by at least 5, 6, 7, 8, 9, 10, 11, 12, 13, 14, 15, 16, 17, 18, 19, 20, 21, 22, 23, 24, or 25%, as compared to, the percentage of central memory cells, for example, central memory T cells, for example, CD95+ central memory T cells, in the population of cells at the beginning of the manufacturing process (for example, at the beginning of the cytokine process or the activation process described herein). In some embodiments, the population of cells at the end of the manufacturing process (for example, at the end of the cytokine process or the activation process described herein) shows a lower percentage of central memory cells, for example, central memory T cells, for example, CD95+ central memory T cells (for example, at least 5, 6, 7, 8, 9, 10, 11, 12, 13, 14, 15, 16, 17, 18, 19, 20, 25, 30, 35, 40, 45, or 50% lower), compared with cells made by an otherwise similar method which lasts, for example, more than 26 hours (for example, which lasts more than 5, 6, 7, 8, 9, 10, 11, or 12 days) or which involves expanding the population of cells in vitro for, for example, more than 3 days (for example, expanding the population of cells in vitro for 3, 4, 5, 6, 7, 8, 9, 10, 11, 12, 13, 14, or 15 days).

[0530] In some embodiments, the percentage of central memory cells, for example, central memory T cells, for example, CD95+ central memory T cells, in the population of cells at the end of the manufacturing process (for example, at the end of the cytokine process or the activation process described herein) is no more than 40, 45, 50, 55, 60, 65, 70, 75, or 80%.

[0531] In some embodiments, the population of cells at the end of the manufacturing process (for example, at the end of the cytokine process or the activation process described herein) after being administered in vivo, persists longer or expands at a higher level (for example, at least 20, 25, 30, 35, 40, 45, 50, 55, 60, 65, 70, 75, 80, 85, or 90% higher), compared with cells made by an otherwise similar method which lasts, for example, more than 26 hours (for example, which lasts more than 5, 6, 7, 8, 9, 10, 11, or 12 days) or which involves expanding the population of cells in vitro for, for example, more than 3 days (for example, expanding the population of cells in vitro for 3, 4, 5, 6, 7, 8, 9, 10, 11, 12, 13, 14, or 15 days).

[0532] In some embodiments, the population of cells has been enriched for IL6R-expressing cells (for example, cells that are positive for IL6Ra and/or I L6 Kb) prior to the beginning of the manufacturing process (for example, prior to the beginning of the cytokine process or the activation process described herein). In some embodiments, the population of cells comprises, for example, no less than 30, 35, 40, 45, 50, 55, 60, 65, 70, 75, or 80% of IL6R-expressing cells (for example, cells that are positive for IL6Ra and/or I L6 Kb) at the beginning of the manufacturing process (for example, at the beginning of the cytokine process or the activation process described herein).

### In Vitro CAR-T Manufacture

[0533] Lentiviral vectors described herein (e.g., those made using a method described herein), can be used, e.g., in the in vitro manufacture of CAR-T cells.

[0534] In some embodiments, cells transduced with the viral vector as described herein, are expanded, e.g., by a method described herein. In some embodiments, the cells are expanded in culture for a period of several hours (e.g., about 2, 3, 4, 5, 6, 7, 8, 9, 10, 15, 18, 21 hours) to about 14 days (e.g., 1, 2, 3, 4, 5, 6, 7, 8, 9, 10, 11, 12, 13 or 14 days). In some embodiments, the cells are expanded for a period of 4 to 9 days. In some embodiments, the cells are expanded for a period of 8 days or less, e.g., 7, 6 or 5 days. In some embodiments, the cells are expanded in culture for 5 days, and the resulting cells are more potent than the same cells expanded in culture for 9 days under the same culture conditions. Potency can be defined, e.g., by various T cell functions, e.g. proliferation, target cell killing, cytokine production, activation, migration, or combinations thereof. In some embodiments, the cells are expanded for 5 days show at least a one, two, three, or four-fold increase in cells doublings upon antigen stimulation as compared to the same cells expanded in culture for 9 days under the same culture conditions. In some embodiments, the cells are expanded in culture for 5 days, and the resulting cells exhibit higher proinflammatory cytokine production, e.g., IFN-γ and/or GM-CSF levels, as compared to the same cells expanded in culture for 9 days under the same culture conditions. In some embodiments, the cells expanded for 5 days show at least a one, two, three, four, five, ten-fold or more increase in pg/ml of proinflammatory cytokine production, e.g., IFN-γ and/or GM-CSF levels, as compared to the same cells expanded in culture for 9 days under the same culture conditions.

[0535] Initial activation steps in the absence of calcium can lead to magnified activation. As those of ordinary skill in the art would readily appreciate a washing step may be accomplished by methods known to those in the art, such as by using a semi-automated “flow-through” centrifuge (for example, the Cobe 2991 cell processor, the Baxter CytoMate, or the Haemonetics Cell Saver 5) according to the manufacturer's instructions. After washing, the cells may be resuspended in a variety of biocompatible buffers, such as, for example, Ca-free, Mg-free PBS, PlasmaLyte A, or other saline solution with or without buffer. Alternatively, the undesirable components of the apheresis sample may be removed, and the cells directly resuspended in culture media.

[0536] It is recognized that the in vitro methods of the application can utilize culture media conditions comprising 5% or less, for example 2%, human AB serum, and employ known culture media conditions and compositions, for example those described in Smith et al., “Ex vivo expansion of human T cells for adoptive immunotherapy using the novel Xeno-free CTS Immune Cell Serum Replacement” Clinical & Translational Immunology (2015) 4, e31; doi:10.1038/cti.2014.31.

[0537] In some aspects, T cells are isolated from peripheral blood lymphocytes by lysing the red blood cells and depleting the monocytes, for example, by centrifugation through a PERCOLL™ gradient or by counterflow centrifugal elutriation. The isolated T cells may be further used in the methods described herein.

[0538] The methods described herein can include, e.g., selection of a specific subpopulation of immune effector cells, e.g., T cells, that are a T regulatory cell-depleted population, CD25+ depleted cells, using, e.g., a negative selection technique, e.g., described herein. Preferably, the population of T regulatory depleted cells contains less than 30%, 25%, 20%, 15%, 10%, 5%, 4%, 3%, 2%, 1% of CD25+ cells.

[0539] In some embodiments, T regulatory cells, e.g., CD25+ T cells, are removed from the population using an anti-CD25 antibody, or fragment thereof, or a CD25-binding ligand, IL-2. In some embodiments, the anti-CD25 antibody, or fragment thereof, or CD25-binding ligand is conjugated to a substrate, e.g., a bead, or is otherwise coated on a substrate, e.g., a bead. In some embodiments, the anti-CD25 antibody, or fragment thereof, is conjugated to a substrate as described herein.

[0540] In some embodiments, the T regulatory cells, e.g., CD25+ T cells, are removed from the population using CD25 depletion reagent from Miltenyi™. In some embodiments, the ratio of cells to CD25 depletion reagent is 1×10⁷ cells to 20 μL, or 1×10⁷ cells to 15 μL, or 1×10⁷ cells to 10 μL, or 1×10⁷ cells to 5 μL, or 1×10⁷ cells to 2.5 μL, or 1×10⁷ cells to 1.25 μL. In some embodiments, e.g., for T regulatory cells, e.g., CD25+ depletion, greater than 500 million cells/ml is used. In a further aspect, a concentration of cells of 600, 700, 800, or 900 million cells/ml is used.

[0541] In some embodiments, the population of immune effector cells to be depleted includes about 6×10⁹ CD25+ T cells. In other aspects, the population of immune effector cells to be depleted include about 1×10⁹ to 1×10¹⁰ CD25+ T cell, and any integer value in between. In some embodiments, the resulting population T regulatory depleted cells has 2×10⁹ T regulatory cells, e.g., CD25+ cells, or less (e.g., 1×10⁹, 5×10⁸, 1×10⁸, 5×10⁷, 1×10⁷, or less CD25+ cells).

[0542] In some embodiments, the T regulatory cells, e.g., CD25+ cells, are removed from the population using the CliniMAC system with a depletion tubing set, such as, e.g., tubing 162-01. In some embodiments, the CliniMAC system is run on a depletion setting such as, e.g., DEPLETION2.1.

[0543] Without wishing to be bound by a particular theory, decreasing the level of negative regulators of immune cells (e.g., decreasing the number of unwanted immune cells, e.g., T_{REG} cells), in a subject prior to apheresis or during manufacturing of a CAR-expressing cell product can reduce the risk of subject relapse. For example, methods of depleting T_{REG} cells are known in the art. Methods of decreasing T_{REG} cells include, but are not limited to, cyclophosphamide, anti-GITR antibody (an anti-GITR antibody described herein), CD25-depletion, and combinations thereof.

[0544] In some embodiments, the manufacturing methods comprise reducing the number of (e.g., depleting) T_{REG} cells prior to manufacturing of the CAR-expressing cell. For example, manufacturing methods comprise contacting the sample, e.g., the apheresis sample, with an anti-GITR antibody and/or an anti-CD25 antibody (or fragment thereof, or a CD25-binding ligand), e.g., to deplete T_{REG} cells prior to manufacturing of the CAR-expressing cell (e.g., T cell, NK cell) product.

[0545] In some embodiments, a subject is pre-treated with one or more therapies that reduce T_{REG} cells prior to collection of cells for CAR-expressing cell product manufacturing, thereby reducing the risk of subject relapse to CAR-expressing cell treatment. In some embodiments, methods of decreasing T_{REG} cells include, but are not limited to, administration to the subject of one or more of cyclophosphamide, anti-GITR antibody, CD25-depletion, or a combination thereof. Administration of one or more of cyclophosphamide, anti-GITR antibody, CD25-depletion, or a combination thereof, can occur before, during or after an infusion of the CAR-expressing cell product.

[0546] In some embodiments, a subject is pre-treated with cyclophosphamide prior to collection of cells for CAR-expressing cell product manufacturing, thereby reducing the risk of subject relapse to CAR-expressing cell treatment. In some embodiments, a subject is pre-treated with an anti-GITR antibody prior to collection of cells for CAR-expressing cell product manufacturing, thereby reducing the risk of subject relapse to CAR-expressing cell treatment.

[0547] In some embodiments, the population of cells to be removed are neither the regulatory T cells or tumor cells, but cells that otherwise negatively affect the expansion and/or function of CART cells, e.g. cells expressing CD14, CD11b, CD33, CD15, or other markers expressed by potentially immune suppressive cells. In some embodiments, such cells are envisioned to be removed concurrently with regulatory T cells and/or tumor cells, or following said depletion, or in another order.

[0548] The methods described herein can include more than one selection step, e.g., more than one depletion step. Enrichment of a T cell population by negative selection can be accomplished, e.g., with a combination of antibodies directed to surface markers unique to the negatively selected cells. One method is cell sorting and/or selection via negative magnetic immunoadherence or flow cytometry that uses a cocktail of monoclonal antibodies directed to cell surface markers present on the cells negatively selected. For example, to enrich for CD4+ cells by negative selection, a monoclonal antibody cocktail can include antibodies to CD14, CD20, CD11b, CD16, HLA-DR, and CD8.

[0549] The methods described herein can further include removing cells from the population which express a tumor antigen, e.g., a tumor antigen that does not comprise CD25, e.g., CD19, CD30, CD38, CD123, CD20, CD14 or CD11b, to thereby provide a population of T regulatory depleted, e.g., CD25+ depleted, and tumor antigen depleted cells that are suitable for expression of a CAR, e.g., a CAR described herein. In some embodiments, tumor antigen expressing cells are removed simultaneously with the T regulatory, e.g., CD25+ cells. For example, an anti-CD25 antibody, or fragment thereof, and an anti-tumor antigen antibody, or fragment thereof, can be attached to the same substrate, e.g., bead, which can be used to remove the cells or an anti-CD25 antibody, or fragment thereof, or the anti-tumor antigen antibody, or fragment thereof, can be attached to separate beads, a mixture of which can be used to remove the cells. In other embodiments, the removal of T regulatory cells, e.g., CD25+ cells, and the removal of the tumor antigen expressing cells is sequential, and can occur, e.g., in either order.

[0550] Also provided are methods that include removing cells from the population which express a check point inhibitor, e.g., a check point inhibitor described herein, e.g., one or more of PD1+ cells, LAG3+ cells, and TIM3+ cells, to thereby provide a population of T regulatory depleted, e.g., CD25+ depleted cells, and check point inhibitor depleted cells, e.g., PD1+, LAG3+ and/or TIM3+ depleted cells. Exemplary check point inhibitors include B7-H1, 37-1, CD160, P1H, 2B4, PD1, TIM3, CEACAM (e.g., CEACAM-1, CEACAM-3 and/or CEACAM-5), LAG3, TIGIT, CTLA-4, BTLA, and LAIR1. In some embodiments, check point inhibitor expressing cells are removed simultaneously with the T regulatory, e.g., CD25+ cells. For example, an anti-CD25 antibody, or fragment thereof, and an anti-check point inhibitor antibody, or fragment thereof, can be attached to the same bead which can be used to remove the cells, or an anti-CD25 antibody, or fragment thereof, and the anti-check point inhibitor antibody, or fragment there, can be attached to separate beads, a mixture of which can be used to remove the cells. In other embodiments, the removal of T regulatory cells, e.g., CD25+ cells, and the removal of the check point inhibitor expressing cells is sequential, and can occur, e.g., in either order.

[0551] Methods described herein can include a positive selection step. For example, T cells can isolated by incubation with anti-CD3/anti-CD28 (e.g., 3×28)-conjugated beads, such as DYNABEADS® M-450 CD3/CD28 T, for a time period sufficient for positive selection of the desired T cells. In some embodiments, the time period is about 30 minutes. In a further embodiment, the time period ranges from 30 minutes to 36 hours or longer and all integer values there between. In a further embodiment, the time period is at least 1, 2, 3, 4, 5, or 6 hours. In yet another embodiment, the time period is 10 to 24 hours, e.g., 24 hours. Longer incubation times may be used to isolate T cells in any situation where there are few T cells as compared to other cell types, such in isolating tumor infiltrating lymphocytes (TIL) from tumor tissue or from immunocompromised individuals. Further, use of longer incubation times can increase the efficiency of capture of CD8+ T cells. Thus, by simply shortening or lengthening the time T cells are allowed to bind to the CD3/CD28 beads and/or by increasing or decreasing the ratio of beads to T cells (as described further herein), subpopulations of T cells can be preferentially selected for or against at culture initiation or at other time points during the process. Additionally, by increasing or decreasing the ratio of anti-CD3 and/or anti-CD28 antibodies on the beads or other surface, subpopulations of T cells can be preferentially selected for or against at culture initiation or at other desired time points. In some embodiments, a T cell population can be selected that expresses one or more of IFN-γ, TNFα, IL-17A, IL-2, IL-3, IL-4, GM-CSF, IL-10, IL-13, granzyme B, and perform, or other appropriate molecules, e.g., other cytokines. Methods for screening for cell expression can be determined, e.g., by the methods described in PCT Publication No.: WO 2013/126712.

[0552] For isolation of a desired population of cells by positive or negative selection, the concentration of cells and surface (e.g., particles such as beads) can be varied. In some aspects, it may be desirable to significantly decrease the volume in which beads and cells are mixed together (e.g., increase the concentration of cells), to ensure maximum contact of cells and beads. For example, in some aspects, a concentration of 10 billion cells/ml, 9 billion/ml, 8 billion/ml, 7 billion/ml, 6 billion/ml, or 5 billion/ml is used. In some aspects, a concentration of 1 billion cells/ml is used. In yet some aspects, a concentration of cells from 75, 80, 85, 90, 95, or 100 million cells/ml is used. In further aspects, concentrations of 125 or 150 million cells/ml can be used.

[0553] Using high concentrations can result in increased cell yield, cell activation, and cell expansion. Further, use of high cell concentrations allows more efficient capture of cells that may weakly express target antigens of interest, such as CD28-negative T cells, or from samples where there are many tumor cells present (e.g., leukemic blood, tumor tissue, etc.). Such populations of cells may have therapeutic value and would be desirable to obtain. For example, using high concentration of cells allows more efficient selection of CD8+ T cells that normally have weaker CD28 expression.

[0554] In some embodiments, it may be desirable to use lower concentrations of cells. By significantly diluting the mixture of T cells and surface (e.g., particles such as beads), interactions between the particles and cells are minimized. This selects for cells that express high amounts of desired antigens to be bound to the particles. For example, CD4+ T cells express higher levels of CD28 and are more efficiently captured than CD8+ T cells in dilute concentrations. In some aspects, the concentration of cells used is 5×10⁶/ml. In other aspects, the concentration used can be from about 1×10⁵/ml to 1×10⁶/ml, and any integer value in between.

[0555] In other aspects, the cells may be incubated on a rotator for varying lengths of time at varying speeds at either 2-10° C. or at room temperature.

[0556] T cells for stimulation can also be frozen after a washing step. Wishing not to be bound by theory, the freeze and subsequent thaw step provide a more uniform product by removing granulocytes and to some extent monocytes in the cell population. After the washing step that removes plasma and platelets, the cells may be suspended in a freezing solution. While many freezing solutions and parameters are known in the art and will be useful in this context, one method involves using PBS containing 20% DMSO and 8% human serum albumin, or culture media containing 10% Dextran 40 and 5% Dextrose, 20% Human Serum Albumin and 7.5% DMSO, or 31.25% Plasmalyte-A, 31.25% Dextrose 5%, 0.45% NaCl, 10% Dextran 40 and 5% Dextrose, 20% Human Serum Albumin, and 7.5% DMSO or other suitable cell freezing media containing for example, Hespan and PlasmaLyte A, the cells then are frozen to −80° C. at a rate of 1° per minute and stored in the vapor phase of a liquid nitrogen storage tank. Other methods of controlled freezing may be used as well as uncontrolled freezing immediately at −20° C. or in liquid nitrogen.

[0557] In some aspects, cryopreserved cells are thawed and washed as described herein and allowed to rest for one hour at room temperature prior to activation using the methods of the present invention.

[0558] Also contemplated in the context of the invention is the collection of blood samples or apheresis product from a subject at a time period prior to when the expanded cells as described herein might be needed. As such, the source of the cells to be expanded can be collected at any time point necessary, and desired cells, such as T cells, can be isolated and frozen for later use in immune effector cell therapy for any number of diseases or conditions that would benefit from immune effector cell therapy, such as those described herein. In some aspects a blood sample or an apheresis is taken from a generally healthy subject. In some aspects, a blood sample or an apheresis is taken from a generally healthy subject who is at risk of developing a disease, but who has not yet developed a disease, and the cells of interest are isolated and frozen for later use. In some aspects, the T cells may be expanded, frozen, and used at a later time. In some aspects, samples are collected from a patient shortly after diagnosis of a particular disease as described herein but prior to any treatments. In a further aspect, the cells are isolated from a blood sample or an apheresis from a subject prior to any number of relevant treatment modalities, including but not limited to treatment with agents such as natalizumab, efalizumab, antiviral agents, chemotherapy, radiation, immunosuppressive agents, such as cyclosporin, azathioprine, methotrexate, mycophenolate, and FK506, antibodies, or other immunoablative agents such as CAMPATH, anti-CD3 antibodies, cytoxan, fludarabine, cyclosporin, FK506, rapamycin, mycophenolic acid, steroids, FR901228, and irradiation.

[0559] In a further aspect of the present invention, T cells are obtained from a patient directly following treatment that leaves the subject with functional T cells. In this regard, it has been observed that following certain cancer treatments, in particular treatments with drugs that damage the immune system, shortly after treatment during the period when patients would normally be recovering from the treatment, the quality of T cells obtained may be optimal or improved for their ability to expand ex vivo. Likewise, following ex vivo manipulation using the methods described herein, these cells may be in a preferred state for enhanced engraftment and in vivo expansion. Thus, it is contemplated within the context of the present invention to collect blood cells, including T cells, dendritic cells, or other cells of the hematopoietic lineage, during this recovery phase. Further, in some aspects, mobilization (for example, mobilization with GM-CSF) and conditioning regimens can be used to create a condition in a subject wherein repopulation, recirculation, regeneration, and/or expansion of particular cell types is favored, especially during a defined window of time following therapy. Illustrative cell types include T cells, B cells, dendritic cells, and other cells of the immune system.

[0560] In some embodiments, a T cell population is diaglycerol kinase (DGK)-deficient. DGK-deficient cells include cells that do not express DGK RNA or protein or have reduced or inhibited DGK activity. DGK-deficient cells can be generated by genetic approaches, e.g., administering RNA-interfering agents, e.g., siRNA, shRNA, miRNA, to reduce or prevent DGK expression. Alternatively, DGK-deficient cells can be generated by treatment with DGK inhibitors described herein.

[0561] In some embodiments, a T cell population is Ikaros-deficient. Ikaros-deficient cells include cells that do not express Ikaros RNA or protein, or have reduced or inhibited Ikaros activity, Ikaros-deficient cells can be generated by genetic approaches, e.g., administering RNA-interfering agents, e.g., siRNA, shRNA, miRNA, to reduce or prevent Ikaros expression. Alternatively, Ikaros-deficient cells can be generated by treatment with Ikaros inhibitors, e.g., lenalidomide.

[0562] In embodiments, a T cell population is DGK-deficient and Ikaros-deficient, e.g., does not express DGK and Ikaros, or has reduced or inhibited DGK and Ikaros activity. Such DGK and Ikaros-deficient cells can be generated by any of the methods described herein.

[0563] In some embodiments, the NK cells are obtained from the subject. In another embodiment, the NK cells are an NK cell line, e.g., NK-92 cell line (Conkwest).

[0564] In a particular exemplary aspect, subjects may undergo leukapheresis, wherein leukocytes are collected, enriched, or depleted ex vivo to select and/or isolate the cells of interest, e.g., T cells.

[0565] These T cell isolates may be expanded by methods described herein. Subjects in need thereof may subsequently undergo standard treatment with high dose chemotherapy followed by peripheral blood stem cell transplantation. In some aspects, following or concurrent with the transplant, subjects receive an infusion of the expanded CAR T cells as prepared by the methods of the present invention. In an additional aspect, expanded cells are administered before or following surgery.

### Additional Expressed Agents

Co-Expression of an Agent that Enhances CAR Activity

[0566] In the embodiments contemplated herein, it is appreciated that additional agents may be encoded in the vectors described herein above. Accordingly, these agents are described below in relation to the CAR-expressing cell.

[0567] In another embodiment, a CAR-expressing immune effector cell described herein can further express another agent, e.g., an agent which enhances the activity of a CAR-expressing cell. For example, in some embodiments, the agent can be an agent which inhibits an inhibitory molecule. Examples of inhibitory molecules include PD-1, PD-L1, CTLA-4, TIM-3, CEACAM (e.g., CEACAM-1, CEACAM-3 and/or CEACAM-5), LAG-3, VISTA, BTLA, TIGIT, LAIR1, CD160, 2B4 and TGFR beta, e.g., as described herein. In some embodiments, the agent that inhibits an inhibitory molecule comprises a first polypeptide, e.g., an inhibitory molecule, associated with a second polypeptide that provides a positive signal to the cell, e.g., an intracellular signaling domain described herein. In some embodiments, the agent comprises a first polypeptide, e.g., of an inhibitory molecule such as PD-1, PD-L1, CTLA-4, TIM-3, CEACAM (e.g., CEACAM-1, CEACAM-3 and/or CEACAM-5), LAG-3, VISTA, BTLA, TIGIT, LAIR1, CD160, 2B4, or TGFR beta, or a fragment of any of these, and a second polypeptide which is an intracellular signaling domain described herein (e.g., comprising a costimulatory domain (e.g., 41BB, CD27 or CD28, e.g., as described herein) and/or a primary signaling domain (e.g., a CD3 zeta signaling domain described herein). In some embodiments, the agent comprises a first polypeptide of PD-1 or a fragment thereof, and a second polypeptide of an intracellular signaling domain described herein (e.g., a CD28, CD27, OX40 or 4-IBB signaling domain described herein and/or a CD3 zeta signaling domain described herein).

### Co-Expression of a Second CAR

[0568] In some embodiments, the CAR-expressing cell described herein can further comprise a second CAR, for example, a second CAR that includes a different antigen binding domain, for example, to the same target (for example, CD19) or a different target (for example, a target other than CD19, for example, a target described herein).

[0569] In some embodiments, the CAR-expressing cell described herein, e.g., the CAR-expressing cell manufactured using a method described herein, comprises (i) a first nucleic acid molecule encoding a first CAR that binds to BCMA and (ii) a second nucleic acid molecule encoding a second CAR that binds to CD19. In some embodiments, the first CAR comprises an anti-BCMA binding domain, a first transmembrane domain, and a first intracellular signaling domain, wherein the anti-BCMA binding domain comprises a heavy chain variable region (VH) comprising a heavy chain complementary determining region 1 (HC CDR1), a heavy chain complementary determining region 2 (HC CDR2), and a heavy chain complementary determining region 3 (HC CDR3), and a light chain variable region (VL) comprising a light chain complementary determining region 1 (LC CDR1), a light chain complementary determining region 2 (LC CDR2), and a light chain complementary determining region 3 (LC CDR3), wherein the HC CDR1, HC CDR2, HC CDR3, LC CDR1, LC CDR2, and LC CDR3 comprise the amino acid sequences of SEQ ID NOs: 86, 87, 88, 95, 96, and 97, respectively. In some embodiments, the second CAR comprises an anti-CD19 binding domain, a second transmembrane domain, and a second intracellular signaling domain, wherein the anti-CD19 binding domain comprises a VH comprising a HC CDR1, a HC CDR2, and a HC CDR3, and a VL comprising a LC CDR1, a LC CDR2, and a LC CDR3, wherein the HC CDR1, HC CDR2, HC CDR3, LC CDR1, LC CDR2, and LC CDR3 comprise the amino acid sequences of SEQ ID NOs: 760, 687, 762, 763, 764, and 765, respectively. In some embodiments, (i) the VH and VL of the anti-BCMA binding domain comprise the amino acid sequences of SEQ ID NOs: 93 and 102, respectively. In some embodiments, the VH and VL of the anti-CD19 binding domain comprise the amino acid sequences of SEQ ID NOs: 250A and 251A, respectively. In some embodiments, the anti-BCMA binding domain comprises the amino acid sequence of SEQ ID NO: 105. In some embodiments, the anti-CD19 binding domain comprises the amino acid sequence of SEQ ID NO: 758. In some embodiments, the first CAR comprises the amino acid sequence of SEQ ID NO: 107. In some embodiments, the second CAR comprise the amino acid sequence of SEQ ID NO: 225.

[0570] In some embodiments, the CAR-expressing cell described herein, e.g., the CAR-expressing cell manufactured using a method described herein, comprises (i) a first nucleic acid molecule encoding a first CAR that binds to CD22 and (ii) a second nucleic acid molecule encoding a second CAR that binds to CD19. In some embodiments, the CD22 CAR comprises a CD22 antigen binding domain, and a first transmembrane domain; a first co-stimulatory signaling domain; and/or a first primary signaling domain. In some embodiments, the CD19 CAR comprises a CD19 antigen binding domain, and a second transmembrane domain; a second co-stimulatory signaling domain; and/or a second primary signaling domain.

[0571] In some embodiments, the CD22 antigen binding domain comprises one or more (e.g., all three) light chain complementarity determining region 1 (LC CDR1), light chain complementarity determining region 2 (LC CDR2), and light chain complementarity determining region 3 (LC CDR3) of a CD22 binding domain described herein, e.g., in Tables 15, 16, 30, 31, or 32; and/or one or more (e.g., all three) heavy chain complementarity determining region 1 (HC CDR1), heavy chain complementarity determining region 2 (HC CDR2), and heavy chain complementarity determining region 3 (HC CDR3) of a CD22 binding domain described herein, e.g., in Tables 15, 16, 30, 31 or 32. In an embodiment, the CD22 antigen binding domain comprises a LC CDR1, LC CDR2 and LC CDR3 of a CD22 binding domain described herein, e.g., in Table 15, 16, 30, 31 or 32; and/or a HC CDR1, HC CDR2 and HC CDR3 of a CD22 binding domain described herein, e.g., in Tables 15, 16, 30, 31 or 32. In some embodiments, the CD19 antigen binding domain comprises: one or more (e.g., all three) LC CDR1, LC CDR2, and LC CDR3 of a CD19 binding domain described herein, e.g., in Tables 1, 30, 31, or 32; and/or one or more (e.g., all three) HC CDR1, HC CDR2, and HC CDR3 of a CD19 binding domain described herein, e.g., in Tables 1, 30, 31, and 32. In some embodiments, the CD19 antigen binding domain comprises a LC CDR1, LC CDR2 and LC CDR3 of a CD19 binding domain described herein, e.g., in Tables 1, 30, 31, and 32; and/or a HC CDR1, HC CDR2 and HC CDR3 of a CD19 binding domain described herein, e.g., in Tables 1, 30, 31, and 32.

[0572] In some embodiment, the CD22 antigen binding domain (e.g., an scFv) comprises a light chain variable (VL) region of a CD22 binding domain described herein, e.g., in Tables 30 or 32; and/or a heavy chain variable (VH) region of a CD22 binding domain described herein, e.g., in Tables 30 or 32. In some embodiments, the CD22 antigen binding domain comprises a VL region comprising an amino acid sequence having at least one, two or three modifications (e.g., substitutions) but not more than 30, 20 or 10 modifications (e.g., substitutions) of a CD22 VL region sequence provided in Table 30 or 32. In some embodiments, the CD22 antigen binding domain comprises a VL region comprising an amino acid sequence provided in Table 30 or 32, or a sequence having at least about 80%, 85%, 90%, 92%, 95%, 97%, 98%, or 99% sequence identity to any of the aforesaid sequences. In some embodiments, the CD22 antigen binding domain comprises a VH region comprising an amino acid sequence having at least one, two or three modifications (e.g., substitutions) but not more than 30, 20 or 10 modifications (e.g., substitutions) of a CD22 VH region sequence provided in Table 30 or 32. In some embodiments, the CD22 antigen binding domain comprises a VH region comprising the amino acid sequence of a CD22 VH region sequence provided in Table 30 or 32, or a sequence having at least about 80%, 85%, 90%, 92%, 95%, 97%, 98%, or 99% sequence identity to any of the aforesaid sequences. In some embodiments, the CD19 antigen binding domain (e.g., an scFv) comprises a VL region of a CD19 binding domain described herein, e.g., in Tables 1, 30, or 32; and/or a VH region of a CD19 binding domain described herein, e.g., in Tables 1, 30, or 32. In some embodiments, the CD19 antigen binding domain comprises a VL region comprising an amino acid sequence having at least one, two or three modifications (e.g., substitutions) but not more than 30, 20 or 10 modifications (e.g., substitutions) of a CD19 VL region sequence provided in Tables 1, 30, or 32. In some embodiments, the CD19 antigen binding domain comprises a VL region comprising the amino acid sequence of a CD19 VL region sequence provided in Tables 1, 30, or 32, or a sequence having at least about 80%, 85%, 90%, 92%, 95%, 97%, 98%, or 99% sequence identity to any of the aforesaid sequences. In some embodiments, the CD19 antigen binding domain comprises a VH region comprising an amino acid sequence having at least one, two or three modifications (e.g., substitutions) but not more than 30, 20 or 10 modifications (e.g., substitutions) of a CD19 VH region sequence provided in Tables 1, 30, or 32. In some embodiments, the CD19 antigen binding domain comprises a VH region comprising the amino acid sequence of a CD19 VH region sequence provided in Tables 1, 30, or 32, or a sequence having at least about 80%, 85%, 90%, 92%, 95%, 97%, 98%, or 99% sequence identity to any of the aforesaid sequences.

[0573] In some embodiments, the CD22 antigen binding comprises an scFv comprising an amino acid sequence having at least one, two or three modifications (e.g., substitutions) but not more than 30, 20 or 10 modifications (e.g., substitutions) of a CD22 scFv sequence provided in Table 30 or 32. In some embodiments, the CD22 antigen binding comprises an scFv comprising an amino acid sequence of a CD22 scFv sequence provided in Table 30 or 32, or a sequence having at least about 80%, 85%, 90%, 92%, 95%, 97%, 98%, or 99% sequence identity to any of the aforesaid sequences. In some embodiments, the CD19 antigen binding domain comprises an scFv comprising an amino acid sequence having at least one, two or three modifications (e.g., substitutions) but not more than 30, 20 or 10 modifications (e.g., substitutions) of a CD19 scFv sequence provided in Tables 1, 30, or 32. In some embodiments, the CD19 antigen binding domain comprises an scFv comprising the amino acid sequence of a CD19 scFv sequence provided in Tables 1, 30, or 32, or a sequence having at least about 80%, 85%, 90%, 92%, 95%, 97%, 98%, or 99% sequence identity to any of the aforesaid sequences.

[0574] In some embodiments, the CD22 CAR molecule and/or the CD19 CAR molecule comprises an additional component, e.g., a signal peptide, a hinge, a transmembrane domain, a co-stimulatory signaling domain and/or a first primary signaling domain, a P2A site, and/or a linker, comprising an amino acid sequence provided in Table 33, or a sequence having at least about 70%, 75%, 80%, 85%, 90%, 92%, 95%, 97%, 98%, or 99% sequence identity to any of the aforesaid sequences; or is encoded by a nucleotide sequence provided in Table 33, or a sequence having at least about 70%, 75%, 80%, 85%, 90%, 92%, 95%, 97%, 98%, or 99% sequence identity to any of the aforesaid sequences.

[0575] Exemplary nucleotide and amino acid sequences of a CAR molecule, e.g., a dual CAR molecule comprising (i) a first CAR that binds to CD22 and (ii) a second CAR that binds to CD19 disclosed herein, is provided in Table 30.

TABLE 30
Dual and tandem CD19-CD22 CAR sequences

| | | |
|---|---|---|
| | SEQ | |
| | ID | |
| Identifier | NO | Sequence |

Tandem CD19-CD22 CARs

| | | |
|---|---|---|
| CG#c171 | 813 | atggccctccctgtcaccgccctgctgctt |
| | | ccgctggctcttctgctccacgccgctcgg |
| | | cccgaaattgtgatgacccagtcacccgcc |
| | | actcttagcctttcacccggtgagcgcgca |
| | | accctgtcttgcagagcctcccaagacatc |
| | | tcaaaataccttaattggtatcaacagaag |
| | | cccggacaggctcctcgccttctgatctac |
| | | cacaccagccggctccattctggaatccct |
| | | gccaggttcagcggtagcggatctgggacc |
| | | gactacaccctcactatcagctcactgcag |
| | | ccagaggacttcgctgtctatttctgtcag |
| | | caagggaacaccctgccctacacctttgga |
| | | cagggcaccaagctcgagattaaaggtgga |
| | | ggtggcagcggaggaggtgggtccggcggt |
| | | ggaggaagccaggtccaactccaagaaagc |
| | | ggaccgggtcttgtgaagccatcagaaact |
| | | ctttcactgacttgtactgtgagcggagtg |
| | | tctctccccgattacggggtgtcttggatc |
| | | agacagccaccggggaagggtctggaatgg |
| | | attggagtgatttggggctctgagactact |
| | | tactaccaatcatccctcaagtcacgcgtc |
| | | accatctcaaaggacaactctaagaatcag |
| | | gtgtcactgaaactgtcatctgtgaccgca |
| | | gccgacaccgccgtgtactattgcgctaag |
| | | cattactattatggcgggagctacgcaatg |
| | | gattactggggacagggtactctggtcacc |
| | | gtgtccagcttggcagaagccgccgcgaaa |
| | | gaagtgcagcttcaacaatcaggaccagga |
| | | ctcgtcaaaccatcacagaccctctccctc |
| | | acatgtgccatctccggggactccatgttg |
| | | agcaattccgacacttggaattggattaga |
| | | caaagcccgtcccggggtctggaatggttg |
| | | ggacgcacctaccaccggtctacttggtac |
| | | gacgactacgcgtcatccgtgcggggaaga |
| | | gtgtccatcaacgtggacacctccaagaac |
| | | cagtacagcctgcagcttaatgccgtgact |
| | | cctgaggatacgggcgtctactactgcgcc |
| | | cgcgtccgcctgcaagacgggaacagctgg |
| | | agcgatgcattcgatgtctggggccaggga |
| | | actatggtcaccgtgtcgtctgggggcggt |
| | | ggatcgggtggcgggggttcggggggcggc |
| | | ggctctcagtccgctcttacccaaccggcc |
| | | tcagcctcggggagccccggccagagcgtg |
| | | accatttcctgcaccggcacttcatccgac |
| | | gtgggcggctacaactacgtgtcctggtac |
| | | caacagcacccgggaaaggcccccaagctc |
| | | atgatctacgacgtgtccaacaggccctcg |
| | | ggagtgtccaaccggttctcgggttcgaaa |
| | | tcgggaaacacagccagcctgaccatcagc |
| | | ggactgcaggctgaagatgaagccgactac |
| | | tactgctcctcctacacctcgtcatccacg |
| | | ctctacgtgttcggcactggaactcagctg |
| | | actgtgctgaccactaccccagcaccgagg |
| | | ccacccaccccggctcctaccatcgcctcc |
| | | cagcctctgtccctgcgtccggaggcatgt |
| | | agacccgcagctggtggggccgtgcatacc |
| | | cggggtcttgacttcgcctgcgatatctac |
| | | atttgggcccctctggctggtacttgcggg |
| | | gtcctgctgctttcactcgtgatcactctt |
| | | tactgtaagcgcggtcggaagaagctgctg |
| | | tacatctttaagcaacccttcatgaggcct |
| | | gtgcagactactcaagaggaggacggctgt |
| | | tcatgccggttcccagaggaggaggaaggc |
| | | ggctgcgaactgcgcgtgaaattcagccgc |
| | | agcgcagatgctccagcctaccagcagggg |
| | | cagaaccagctctacaacgaactcaatctt |
| | | ggtcggagagaggagtacgacgtgctggac |
| | | aagcggagaggacgggacccagaaatgggg |
| | | ggaagccgcgcagaaagaatccccaagagg |
| | | gcctgtacaacgagctccaaaaggataaga |
| | | tggcagaagcctatagcgagattggtatga |
| | | aaggggaacgcagaagaggcaaaggccacg |
| | | acggactgtaccagggactcagcaccgcca |
| | | ccaaggacacctatgacgctcttcacatgc |
| | | aggccctgccgcctcgg |
| | 814 | MALPVTALLLPLALLLHAARPEIVMTQSPA |
| | | TLSLSPGERATLSCRASQDISKYLNWYQQK |
| | | PGQAPRLLIYHTSRLHSGIPARFSGSGSGT |
| | | DYTLTISSLQPEDFAVYFCQQGNTLPYTFG |
| | | QGTKLEIKGGGGSGGGGSGGGGSQVQLQES |
| | | GPGLVKPSETLSLTCTVSGVSLPDYGVSWI |
| | | RQPPGKGLEWIGVIWGSETTYYQSSLKSRV |
| | | TISKDNSKNQVSLKLSSVTAADTAVYYCAK |
| | | HYYYGGSYAMDYWGQGTLVTVSSLAEAAAK |
| | | EVQLQQSGPGLVKPSQTLSLTCAISGDSML |
| | | SNSDTWNWIRQSPSRGLEWLGRTYHRSTWY |
| | | DDYASSVRGRVSINVDTSKNQYSLQLNAVT |
| | | PEDTGVYYCARVRLQDGNSWSDAFDVWGQG |
| | | TMVTVSSGGGGSGGGGSGGGGSQSALTQPA |
| | | SASGSPGQSVTISCTGTSSDVGGYNYVSWY |
| | | QQHPGKAPKLMIYDVSNRPSGVSNRFSGSK |
| | | SGNTASLTISGLQAEDEADYYCSSYTSSST |
| | | LYVFGTGTQLTVLTTTPAPRPPTPAPTIAS |
| | | QPLSLRPEACRPAAGGAVHTRGLDFACDIY |
| | | IWAPLAGTCGVLLLSLVITLYCKRGRKKLL |
| | | YIFKQPFMRPVQTTQEEDGCSCRFPEEEEG |
| | | GCELRVKFSRSADAPAYQQGQNQLYNELNL |
| | | GRREEYDVLDKRRGRDPEMGGKPRRKNPQE |
| | | GLYNELQKDKMAEAYSEIGMKGERRRGKGH |
| | | DGLYQGLSTATKDTYDALHMQALPPR |
| CG#c182 | 815 | atggccctccctgtcaccgccctgctgctt |
| | | ccgctggctcttctgctccacgccgctcgg |
| | | cccgaagtgcagcttcaacaatcaggacca |
| | | ggactcgtcaaaccatcacagaccctctcc |
| | | ctcacatgtgccatctccggggactccatg |
| | | ttgagcaattccgacacttggaattggatt |
| | | agacaaagcccgtcccggggtctggaatgg |
| | | ttgggacgcacctaccaccggtctacttgg |
| | | tacgacgactacgcgtcatccgtgcgggga |
| | | agagtgtccatcaacgtggacacctccaag |
| | | aaccagtacagcctgcagcttaatgccgtg |
| | | actcctgaggatacgggcgtctactactgc |
| | | gcccgcgtccgcctgcaagacgggaacagc |
| | | tggagcgatgcattcgatgtctggggccag |
| | | ggaactatggtcaccgtgtcgtctgggggc |
| | | ggtggatcgggtggcgggggttcggggggg |
| | | gcggctctcagtccgctcttacccaaccgg |
| | | cctcagcctcggggagccccggccagagcg |
| | | tgaccatttcctgcaccggcacttcatccg |
| | | acgtgggcggctacaactacgtgtcctggt |
| | | accaacagcacccgggaaaggcccccaagc |
| | | tcatgatctacgacgtgtccaacaggccct |
| | | cgggagtgtccaaccggttctcgggttcga |
| | | aatcgggaaacacagccagcctgaccatca |
| | | gcggactgcaggctgaagatgaagccgact |
| | | actactgctcctcctacacctcgtcatcca |
| | | cgctctacgtgttcggcactggaactcagc |
| | | tgactgtgctggggggggagggagtgaaat |
| | | tgtgatgacccagtcacccgccactcttag |
| | | cctttcacccggtgagcgcgcaaccctgtc |
| | | ttgcagagcctcccaagacatctcaaaata |
| | | ccttaattggtatcaacagaagcccggaca |
| | | ggctcctcgccttctgatctaccacaccag |
| | | ccggctccattctggaatccctgccaggtt |
| | | cagcggtagcggatctgggaccgactacac |
| | | cctcactatcagctcactgcagccagagga |
| | | cttcgctgtctatttctgtcagcaagggaa |
| | | caccctgccctacacctttggacagggcac |
| | | caagctcgagattaaaggtggaggtggcag |
| | | cggaggaggtgggtccggcggtggaggaag |
| | | ccaggtccaactccaagaaagcggaccggg |
| | | tcttgtgaagccatcagaaactctttcact |
| | | gacttgtactgtgagcggagtgtctctccc |
| | | cgattacggggtgtcttggatcagacagcc |
| | | accggggaagggtctggaatggattggagt |
| | | gatttggggctctgagactacttactacca |
| | | atcatccctcaagtcacgcgtcaccatctc |
| | | aaaggacaactctaagaatcaggtgtcact |
| | | gaaactgtcatctgtgaccgcagccgacac |
| | | cgccgtgtactattgcgctaagcattacta |
| | | ttatggcgggagctacgcaatggattactg |
| | | gggacagggtactctggtcaccgtgtccag |
| | | caccactaccccagcaccgaggccacccac |
| | | cccggctcctaccatcgcctcccagcctct |
| | | gtccctgcgtccggaggcatgtagacccgc |
| | | agctggtggggccgtgcatacccggggtct |
| | | tgacttcgcctgcgatatctacatttgggc |
| | | ccctctggctggtacttgcggggtcctgct |
| | | gctttcactcgtgatcactctttactgtaa |
| | | gcgcggtcggaagaagctgctgtacatctt |
| | | taagcaacccttcatgaggcctgtgcagac |
| | | tactcaagaggaggacggctgttcatgccg |
| | | gttcccagaggaggaggaaggcggctgcga |
| | | actgcgcgtgaaattcagccgcagcgcaga |
| | | tgctccagcctaccagcaggggcagaacca |
| | | gctctacaacgaactcaatcttggtcggag |
| | | agaggagtacgacgtg |
| | 816 | ctggacaagcggagaggacgggacccagaa |
| | | atggggggaagccgcgcagaaagaatcccc |
| | | aagagggcctgtacaacgagctccaaaagg |
| | | ataagatggcagaagcctatagcgagattg |
| | | gtatgaaaggggaacgcagaagaggcaaag |
| | | gccacgacggactgtaccagggactcagca |
| | | ccgccaccaaggacacctatgacgctcttc |
| | | acatgcaggccctgccgcctcggMALPVTA |
| | | LLLPLALLLHAARPEVQLQQSGPGLVKPSQ |
| | | TLSLTCAISGDSMLSNSDTWNWIRQSPSRG |
| | | LEWLGRTYHRSTWYDDYASSVRGRVSINVD |
| | | TSKNQYSLQLNAVTPEDTGVYYCARVRLQD |
| | | GNSWSDAFDVWGQGTMVTVSSGGGGSGGGG |
| | | SGGGGSQSALTQPASASGSPGQSVTISCTG |
| | | TSSDVGGYNYVSWYQQHPGKAPKLMIYDVS |
| | | NRPSGVSNRFSGSKSGNTASLTISGLQAED |
| | | EADYYCSSYTSSSTLYVFGTGTQLTVLGGG |
| | | GSEIVMTQSPATLSLSPGERATLSCRASQD |
| | | ISKYLNWYQQKPGQAPRLLIYHTSRLHSGI |
| | | PARFSGSGSGTDYTLTISSLQPEDFAVYFC |
| | | QQGNTLPYTFGQGTKLEIKGGGGSGGGGSG |
| | | GGGSQVQLQESGPGLVKPSETLSLTCTVSG |
| | | VSLPDYGVSWIRQPPGKGLEWIGVIWGSET |
| | | TYYQSSLKSRVTISKDNSKNQVSLKLSSVT |
| | | AADTAVYYCAKHYYYGGSYAMDYWGQGTLV |
| | | TVSSTTTPAPRPPTPAPTIASQPLSLRPEA |
| | | CRPAAGGAVHTRGLDFACDIYIWAPLAGTC |
| | | GVLLLSLVITLYCKRGRKKLLYIFKQPFMR |
| | | PVQTTQEEDGCSCRFPEEEEGGCELRVKFS |
| | | RSADAPAYQQGQNQLYNELNLGRREEYDVL |
| | | DKRRGRDPEMGGKPRRKNPQEGLYNELQKD |
| | | KMAEAYSEIGMKGERRRGKGHDGLYQGLST |
| | | ATKDTYDALHMQALPPR |
| CG#c188 | 817 | atggccctccctgtcaccgccctgctgctt |
| | | ccgctggctcttctgctccacgccgctcgg |
| | | ccccagtccgctcttacccaaccggcctca |
| | | gcctcggggagccccggccagagcgtgacc |
| | | atttcctgcaccggcacttcatccgacgtg |
| | | ggcggctacaactacgtgtcctggtaccaa |
| | | cagcacccgggaaaggcccccaagctcatg |
| | | atctacgacgtgtccaacaggccctcggga |
| | | gtgtccaaccggttctcgggttcgaaatcg |
| | | ggaaacacagccagcctgaccatcagcgga |
| | | ctgcaggctgaagatgaagccgactactac |
| | | tgctcctcctacacctcgtcatccacgctc |
| | | tacgtgttcggcactggaactcagctgact |
| | | gtgctgggcggaggaggctccgaagtgcag |
| | | cttcaacaatcaggaccaggactcgtcaaa |
| | | ccatcacagaccctctccctcacatgtgcc |
| | | atctccggggactccatgttgagcaattcc |
| | | gacacttggaattggattagacaaagcccg |
| | | tcccggggtctggaatggttgggacgcacc |
| | | taccaccggtctacttggtacgacgactac |
| | | gcgtcatccgtgcggggaagagtgtccatc |
| | | aacgtggacacctccaagaaccagtacagc |
| | | ctgcagcttaatgccgtgactcctgaggat |
| | | acgggcgtctactactgcgcccgcgtccgc |
| | | ctgcaagacgggaacagctggagcgatgca |
| | | ttcgatgtctggggccagggaactatggtc |
| | | accgtgtcgtctggagggggagggagtgaa |
| | | attgtgatgacccagtcacccgccactctt |
| | | agcctttcacccggtgagcgcgcaaccctg |
| | | tcttgcagagcctcccaagacatctcaaaa |
| | | taccttaattggtatcaacagaagcccgga |
| | | caggctcctcgccttctgatctaccacacc |
| | | agccggctccattctggaatccctgccagg |
| | | ttcagcggtagcggatctgggaccgactac |
| | | accctcactatcagctcactgcagccagag |
| | | gacttcgctgtctatttctgtcagcaaggg |
| | | aacaccctgccctacacctttggacagggc |
| | | accaagctcgagattaaaggtggaggtggc |
| | | agcggaggaggtgggtccggcggtggagga |
| | | agccaggtccaactccaagaaagcggaccg |
| | | ggtcttgtgaagccatcagaaactctttca |
| | | ctgacttgtactgtgagcggagtgtctctc |
| | | cccgattacggggtgtcttggatcagacag |
| | | ccaccggggaagggtctggaatggattgga |
| | | gtgatttggggctctgagactacttactac |
| | | caatcatccctcaagtcacgcgtcaccatc |
| | | tcaaaggacaactctaagaatcaggtgtca |
| | | ctgaaactgtcatctgtgaccgcagccgac |
| | | accgccgtgtactattgcgctaagcattac |
| | | tattatggcgggagctacgcaatggattac |
| | | tggggacagggtactctggtcaccgtgtcc |
| | | agcaccactaccccagcaccgaggccaccc |
| | | accccggctcctaccatcgcctcccagcct |
| | | ctgtccctgcgtccggaggcatgtagaccc |
| | | gcagctggtggggccgtgcatacccggggt |
| | | cttgacttcgcctgcgatatctacatttgg |
| | | gcccctctggctggtacttgcggggtcctg |
| | | ctgctttcactcgtgatcactctttactgt |
| | | aagcgcggtcggaagaagctgctgtacatc |
| | | tttaagcaacccttcatgaggcctgtgcag |
| | | actactcaagaggaggacggctgttcatgc |
| | | cggttcccagaggaggaggaaggcggctgc |
| | | gaactgcgcgtgaaattcagccgcagcgca |
| | | gatgctccagcctaccagcaggggcagaac |
| | | cagctctacaacgaactcaatcttggtcgg |
| | | agagaggagtacgacgtgctggacaagcgg |
| | | agaggacgggacccagaaatgggcgggaag |
| | | ccgcgcagaaagaatccccaagagggcctg |
| | | tacaacgagctccaaaaggataagatggca |
| | | gaagcctatagcgagattggtatgaaaggg |
| | | gaacgcagaagaggcaaaggccacgacgga |
| | | ctgtaccagggactcagcaccgccaccaag |
| | | gacacctatgacgctcttcacatgcaggcc |
| | | ctgccgcctcgg |
| | 818 | MALPVTALLLPLALLLHAARPQSALTQPAS |
| | | ASGSPGQSVTISCTGTSSDVGGYNYVSWYQ |
| | | QHPGKAPKLMIYDVSNRPSGVSNRFSGSKS |
| | | GNTASLTISGLQAEDEADYYCSSYTSSSTL |
| | | YVFGTGTQLTVLGGGGSEVQLQQSGPGLVK |
| | | PSQTLSLTCAISGDSMLSNSDTWNWIRQSP |
| | | SRGLEWLGRTYHRSTWYDDYASSVRGRVSI |
| | | NVDTSKNQYSLQLNAVTPEDTGVYYCARVR |
| | | LQDGNSWSDAFDVWGQGTMVTVSSGGGGSE |
| | | IVMTQSPATLSLSPGERATLSCRASQDISK |
| | | YLNWYQQKPGQAPRLLIYHTSRLHSGIPAR |
| | | FSGSGSGTDYTLTISSLQPEDFAVYFCQQG |
| | | NTLPYTFGQGTKLEIKGGGGSGGGGGGGGS |
| | | QVQLQESGPGLVKPSETLSLTCTVSGVSLP |
| | | DYGVSWIRQPPGKGLEWIGVIWGSETTYYQ |
| | | SSLKSRVTISKDNSKNQVSLKLSSVTAADT |
| | | AVYYCAKHYYYGGSYAMDYWGQGTLVTVSS |
| | | TTTPAPRPPTPAPTIASQPLSLRPEACRPA |
| | | AGGAVHTRGLDFACDIYIWAPLAGTCGVLL |
| | | LSLVITLYCKRGRKKLLYIFKQPFMRPVQT |
| | | TQEEDGCSCRFPEEEEGGCELRVKFSRSAD |
| | | APAYQQGQNQLYNELNLGRREEYDVLDKRR |
| | | GRDPEMGGKPRRKNPQEGLYNELQKDKMAE |
| | | AYSEIGMKGERRRGKGHDGLYQGLSTATKD |
| | | TYDALHMQALPPR |
| CG#c224 | 819 | atggccctgcccgtgactgcgctcctgctt |
| | | ccgttggccctgctcctgcatgccgccaga |
| | | cctcagtccgctctgactcagccggcctca |
| | | gcttcggggtcccctggtcaaagcgtcact |
| | | atttcctgtaccggaacctcatcagacgtg |
| | | ggcggctacaattacgtgtcctggtaccaa |
| | | cagcaccccggaaaggctcctaagcttatg |
| | | atctacgacgtgtccaaccggccgtcagga |
| | | gtgtccaacagattctccggctccaagagc |
| | | ggaaacactgccagcttgaccattagcggc |
| | | ttgcaggccgaggacgaagccgactactac |
| | | tgctctagctacacatcctcgtctaccctc |
| | | tacgtgtttggaacggggacccagctgact |
| | | gtgctcgggggtggaggatcagaggtgcaa |
| | | ctccagcagtccggtcctggcctcgtgaaa |
| | | ccgtcccaaaccctgtccctgacttgcgcc |
| | | atctcgggcgactccatgtgtccaattccg |
| | | acacctggaactggattagacaatcgccta |
| | | gccggggactcgaatggctgggccggacct |
| | | accaccggtccacgtggtatgacgactacg |
| | | caagctccgtccggggaagggtgtccatta |
| | | acgtcgatacctccaagaaccagtacagcc |
| | | ttcagctgaacgctgtgacccccgaggata |
| | | ccggcgtctactactgtgcaagagtgcgat |
| | | tgcaggatggaaactcgtggtcggacgcat |
| | | tcgatgtctggggacagggaactatggtga |
| | | ccgtgtcctcgggcggaggcgggagcggag |
| | | gaggaggctctggcggaggaggaagcgaga |
| | | ttgtcatgactcagtccccggccacactct |
| | | ccctgtcacccggagaaagagcaaccctga |
| | | gctgcagggcgtcccaggacatctcgaagt |
| | | acctgaactggtaccagcagaagcctggac |
| | | aagcaccccgcctcctgatctaccacacct |
| | | cgcggctgcattcgggaatccccgccagat |
| | | tctcagggagcggatcaggaaccgactaca |
| | | ccctgactatctcgagcctgcaaccagagg |
| | | atttcgccgtgtacttctgccagcaaggaa |
| | | acaccctgccctacacctttggacagggaa |
| | | ccaagctcgagattaaggggggggtggatc |
| | | gggagggggtggatcaggaggaggggctca |
| | | caagtccagctgcaagaatccggtccggga |
| | | cttgtgaagccgtccgaaaccctgtcactg |
| | | acttgcactgtgtccggggtgtcattgccc |
| | | gactacggcgtgagctggattcggcagccc |
| | | cctggaaagggattggaatggatcggcgtg |
| | | atctggggttcggaaactacctactatcag |
| | | tcctcactgaagtcccgcgtgaccatcagc |
| | | aaggataattccaaaaaccaagtgtctctg |
| | | aagctctccagcgtcactgccgccgatact |
| | | gccgtgtactactgcgccaagcactactat |
| | | tacggcggttcgtacgccatggactactgg |
| | | ggcaagggacactcgtgaccgtgtcatcca |
| | | ccactaccccagcaccgaggccacccaccc |
| | | cggctcctaccatcgcctcccagcctctgt |
| | | ccctgcgtccggaggcatgtagacccgcag |
| | | ctggtggggccgtgcatacccggggtcttg |
| | | acttcgcctgcgatatctacatttgggccc |
| | | ctctggctggtacttgcggggtcctgctgc |
| | | tttcactcgtgatcactctttactgtaagc |
| | | gcggtcggaagaagctgctgtacatcttta |
| | | agcaacccttcatgaggcctgtgcagacta |
| | | ctcaagaggaggacggctgttcatgccggt |
| | | tcccagaggaggaggaaggcggctgcgaac |
| | | tgcgcgtgaaattcagccgcagcgcagatg |
| | | ctccagcctaccagcaggggcagaaccagc |
| | | tctacaacgaactcaatcttggtcggagag |
| | | aggagtacgacgtgctggacaagcggagag |
| | | gacgggacccagaaatgggcgggaagccgc |
| | | gcagaaagaatccccaagagggcctgtaca |
| | | acgagctccaaaaggataagatggcagaag |
| | | cctatagcgagattggtatgaaaggggaac |
| | | gcagaagaggcaaaggccacgacggactgt |
| | | accagggactcagcaccgccaccaaggaca |
| | | cctatgacgctcttcacatgcaggccctgc |
| | | cgcctcgg |
| | 820 | MALPVTALLLPLALLLHAARPQSALTQPAS |
| | | ASGSPGQSVTISCTGTSSDVGGYNYVSWYQ |
| | | QHPGKAPKLMIYDVSNRPSGVSNRFSGSKS |
| | | GNTASLTISGLQAEDEADYYCSSYTSSSTL |
| | | YVFGTGTQLTVLGGGGSEVQLQQSGPGLVK |
| | | PSQTLSLTCAISGDSMLSNSDTWNWIRQSP |
| | | SRGLEWLGRTYHRSTWYDDYASSVRGRVSI |
| | | NVDTSKNQYSLQLNAVTPEDTGVYYCARVR |
| | | LQDGNSWSDAFDVWGQGTMVTVSSGGGGSG |
| | | GGGSGGGGSEIVMTQSPATLSLSPGERATL |
| | | SCRASQDISKYLNWYQQKPGQAPRLLIYHT |
| | | SRLHSGIPARFSGSGSGTDYTLTISSLQPE |
| | | DFAVYFCQQGNTLPYTFGQGTKLEIKGGGG |
| | | SGGGGSGGGGSQVQLQESGPGLVKPSETLS |
| | | LTCTVSGVSLPDYGVSWIRQPPGKGLEWIG |
| | | VIWGSETTYYQSSLKSRVTISKDNSKNQVS |
| | | LKLSSVTAADTAVYYCAKHYYYGGSYAMDY |
| | | WGQGTLVTVSSTTTPAPRPPTPAPTIASQP |
| | | LSLRPEACRPAAGGAVHTRGLDFACDIYIW |
| | | APLAGTCGVLLLSLVITLYCKRGRKKLLYI |
| | | FKQPFMRPVQTTQEEDGCSCRFPEEEEGGC |
| | | ELRVKFSRSADAPAYQQGQNQLYNELNLGR |
| | | REEYDVLDKRRGRDPEMGGKPRRKNPQEGL |
| | | YNELQKDKMAEAYSEIGMKGERRRGKGHDG |
| | | LYQGLSTATKDTYDALHMQALPPR |
| CG#c227 | 821 | atggccctgcccgtgactgcgctcctgctt |
| | | ccgttggccctgctcctgcatgccgccaga |
| | | cctcagtccgctctgactcagccggcctca |
| | | gcttcggggtcccctggtcaaagcgtcact |
| | | atttcctgtaccggaacctcatcagacgtg |
| | | ggcggctacaattacgtgtcctggtaccaa |
| | | cagcaccccggaaaggctcctaagcttatg |
| | | atctacgacgtgtccaaccggccgtcagga |
| | | gtgtccaacagattctccggctccaagagc |
| | | ggaaacactgccagcttgaccattagcggc |
| | | ttgcaggccgaggacgaagccgactactac |
| | | tgctctagctacacatcctcgtctaccctc |
| | | tacgtgtttggaacggggacccagctgact |
| | | gtgctcgggggtggaggatcagaggtgcaa |
| | | ctccagcagtccggtcctggcctcgtgaaa |
| | | ccgtcccaaaccctgtccctgacttgcgcc |
| | | atctcgggcgactccatgctgtccaattcc |
| | | gacacctggaactggattagacaatcgcct |
| | | agccggggactcgaatggctgggccggacc |
| | | taccaccggtccacgtggtatgacgactac |
| | | gcaagctccgtccggggaagggtgtccatt |
| | | aacgtcgatacctccaagaaccagtacagc |
| | | cttcagctgaacgctgtgacccccgaggat |
| | | accggcgtctactactgtgcaagagtgcga |
| | | ttgcaggatggaaactcgtggtcggacgca |
| | | ttcgatgtctggggacagggaactatggtc |
| | | actgtgtcctccggcggtggaggctcgggg |
| | | gggggcggctcaggaggaggcggctcacaa |
| | | gtccagctgcaagaatccggtccgggactt |
| | | gtgaagccgtccgaaaccctgtcactgact |
| | | tgcactgtgtccggggtgtcattgcccgac |
| | | tacggcgtgagctggattcggcagccccct |
| | | ggaaagggattggaatggatcggcgtgatc |
| | | tggggttcggaaactacctactatcagtcc |
| | | tcactgaagtcccgcgtgaccatcagcaag |
| | | gataattccaaaaaccaagtgtctctgaag |
| | | ctctccagcgtcactgccgccgatactgcc |
| | | gtgtactactgcgccaagcactactattac |
| | | ggcggttcgtacgccatggactactgggga |
| | | caaggcactcttgtgactgtgtcaagcggc |
| | | ggtggagggagcggtgggggcggttcagga |
| | | ggaggcggatcagagatcgtgatgacccaa |
| | | tccccagccaccctgtccctcagccctgga |
| | | gaaagagccaccctgagctgccgggcctcc |
| | | caggatatcagcaagtacttgaactggtac |
| | | caacaaaagccggggcaggcgccccggctc |
| | | ctgatctaccacacctcgcgcctccactca |
| | | ggtatccccgccagattctcagggagcggc |
| | | tccggtactgactacaccctgactatttcc |
| | | tcactgcagccagaggactttgccgtgtac |
| | | ttctgccagcagggaaacactctgccgtac |
| | | accttcgggcagggaacgaagcttgaaatt |
| | | aagaccactaccccagcaccgaggccaccc |
| | | accccggctcctaccatcgcctcccagcct |
| | | ctgtccctgcgtccggaggcatgtagaccc |
| | | gcagctggtggggccgtgcatacccggggt |
| | | cttgacttcgcctgcgatatctacatttgg |
| | | gcccctctggctggtacttgcggggtcctg |
| | | ctgctttcactcgtgatcactctttactgt |
| | | aagcgcggtcggaagaagctgctgtacatc |
| | | tttaagcaacccttcatgaggcctgtgcag |
| | | actactcaagaggaggacggctgttcatgc |
| | | cggttcccagaggaggaggaaggcggctgc |
| | | gaactgcgcgtgaaattcagccgcagcgca |
| | | gatgctccagcctaccagcaggggcagaac |
| | | cagctctacaacgaactcaatcttggtcgg |
| | | agagaggagtacgacgtgctggacaagcgg |
| | | agaggacgggacccagaaatgggcgggaag |
| | | ccgcgcagaaagaatccccaagagggcctg |
| | | tacaacgagctccaaaaggataagatggca |
| | | gaagcctatagcgagattggtatgaaaggg |
| | | gaacgcagaagaggcaaaggccacgacgga |
| | | ctgtaccagggactcagcaccgccaccaag |
| | | gacacctatgacgctcttcacatgcaggcc |
| | | ctgccgcctcgg |
| | 822 | MALPVTALLLPLALLLHAARPQSALTQPAS |
| | | ASGSPGQSVTISCTGTSSDVGGYNYVSWYQ |
| | | QHPGKAPKLMIYDVSNRPSGVSNRFSGSKS |
| | | GNTASLTISGLQAEDEADYYCSSYTSSSTL |
| | | YVFGTGTQLTVLGGGGSEVQLQQSGPGLVK |
| | | PSQTLSLTCAISGDSMLSNSDTWNWIRQSP |
| | | SRGLEWLGRTYHRSTWYDDYASSVRGRVSI |
| | | NVDTSKNQYSLQLNAVTPEDTGVYYCARVR |
| | | LQDGNSWSDAFDVWGQGTMVTVSSGGGGSG |
| | | GGGSGGGGSQVQLQESGPGLVKPSETLSLT |
| | | CTVSGVSLPDYGVSWIRQPPGKGLEWIGVI |
| | | WGSETTYYQSSLKSRVTISKDNSKNQVSLK |
| | | LSSVTAADTAVYYCAKHYYYGGSYAMDYWG |
| | | QGTLVTVSSGGGGSGGGGSGGGGSEIVMTQ |
| | | SPATLSLSPGERATLSCRASQDISKYLNWY |
| | | QQKPGQAPRLLIYHTSRLHSGIPARFSGSG |
| | | SGTDYTLTISSLQPEDFAVYFCQQGNTLPY |
| | | TFGQGTKLEIKTTTPAPRPPTPAPTIASQP |
| | | LSLRPEACRPAAGGAVHTRGLDFACDIYIW |
| | | APLAGTCGVLLLSLVITLYCKRGRKKLLYI |
| | | FKQPFMRPVQTTQEEDGCSCRFPEEEEGGC |
| | | ELRVKFSRSADAPAYQQGQNQLYNELNLGR |
| | | REEYDVLDKRRGRDPEMGGKPRRKNPQEGL |
| | | YNELQKDKMAEAYSEIGMKGERRRGKGHDG |
| | | LYQGLSTATKDTYDALHMQALPPR |

Dual CD19-CD22 CARs
CG#c201

| | | |
|---|---|---|
| Full length | 823 | atggccctccctgtcaccgccctgctgctt |
| CD19-CD22 | | ccgctggctcttctgctccacgccgctcgg |
| Dual CAR | | cccgaagtgcagctgcagcagtcagggcct |
| nucleic | | ggcctggtcaagccgtcgcagaccctctcc |
| acid | | ctgacatgcgccattagcggggactccatg |
| | | ctgagcaactcggacacctggaactggatt |
| | | cggcagtccccttcccggggactcgagtgg |
| | | ctcggacgcacctaccatcggagcacttgg |
| | | tacgacgactacgcctcctccgtgagaggt |
| | | cgcgtgtcgatcaacgtggatacctcgaag |
| | | aaccagtatagcttgcaactgaacgccgtg |
| | | acccctgaggataccggagtgtactattgt |
| | | gcgagagtcaggctgcaagacggaaactcc |
| | | tggtccgacgcatttgatgtctggggacag |
| | | ggtactatggtcacggtgtcatctggaggc |
| | | ggaggatcgcaaagcgccctgactcagccg |
| | | gcttcggctagcggttcaccggggcagtcc |
| | | gtgactatctcctgcaccgggacttcctcc |
| | | gacgtgggaggctacaattacgtgtcctgg |
| | | taccagcaacaccccggcaaagccccaaag |
| | | ctgatgatctacgacgtcagcaacagaccc |
| | | agcggagtgtccaaccggttcagcggctcc |
| | | aagtccggcaacaccgcctccctgaccatc |
| | | agcgggcttcaggccgaagatgaggcggat |
| | | tactactgctcctcgtacacctcaagctca |
| | | actctgtacgtgttoggcaccggtactcag |
| | | ctcaccgtgctgaccactaccccagcaccg |
| | | aggccacccaccccggctcctaccatcgcc |
| | | tcccagcctctgtccctgcgtccggaggca |
| | | tgtagacccgcagctggtggggccgtgcat |
| | | acccggggtcttgacttcgcctgcgatatc |
| | | tacatttgggcccctctggctggtacttgc |
| | | ggggtcctgctgctttcactcgtgatcact |
| | | ctttactgtaagcgcggtcggaagaagctg |
| | | ctgtacatctttaagcaacccttcatgagg |
| | | cctgtgcagactactcaagaggaggacggc |
| | | tgttcatgccggttcccagaggaggaggaa |
| | | ggcggctgcgaactgcgcgtgaaattcagc |
| | | cgcagcgcagatgctccagcctaccagcag |
| | | gggcagaaccagctctacaacgaactcaat |
| | | cttggtcggagagaggagtacgacgtgctg |
| | | gacaagcggagaggacgggacccagaaatg |
| | | ggcgggaagccgcgcagaaagaatccccaa |
| | | gagggcctgtacaacgagctccaaaaggat |
| | | aagatggcagaagcctatagcgagattggt |
| | | atgaaaggggaacgcagaagaggcaaaggc |
| | | cacgacggactgtaccagggactcagcacc |
| | | gccaccaaggacacctatgacgctcttcac |
| | | atgcaggccctgccgcctcggggaagcgga |
| | | gctactaacttcagcctgctgaagcaggct |
| | | ggagacgtggaggagaaccctggacctatg |
| | | gccttaccagtgaccgccttgctcctgccg |
| | | ctggccttgctgctccacgccgccaggccg |
| | | gaaattgtgatgacccagtcacccgccact |
| | | cttagcctttcacccggtgagcgcgcaacc |
| | | ctgtcttgcagagcctcccaagacatctca |
| | | aaataccttaattggtatcaacagaagccc |
| | | ggacaggctcctcgccttctgatctaccac |
| | | accagccggctccattctggaatccctgcc |
| | | aggttcagcggtagcggatctgggaccgac |
| | | tacaccctcactatcagctcactgcagcca |
| | | gaggacttcgctgtctatttctgtcagcaa |
| | | gggaacaccctgccctacacctttggacag |
| | | ggcaccaagctcgagattaaaggtggaggt |
| | | ggcagcggaggaggtgggtccggcggtgga |
| | | ggaagccaggtccaactccaagaaagcgga |
| | | ccgggtcttgtgaagccatcagaaactctt |
| | | tcactgacttgtactgtgagcggagtgtct |
| | | ctccccgattacggggtgtcttggatcaga |
| | | cagccaccggggaagggtctggaatggatt |
| | | ggagtgatttggggctctgagactacttac |
| | | taccaatcatccctcaagtcacgcgtcacc |
| | | atctcaaaggacaactctaagaatcaggtg |
| | | tcactgaaactgtcatctgtgaccgcagcc |
| | | gacaccgccgtgtactattgcgctaagcat |
| | | tactattatgggggagctacgcaatggatt |
| | | actggggacagggtactctggtcaccgtgt |
| | | ccagcaccacgacgccagcgccgcgaccac |
| | | caacaccggcgcccaccatcgcgtcgcagc |
| | | ccctgtccctgcgcccagaggcgtgccggc |
| | | cagcggggggggcgcagtgcacacgagggg |
| | | gctggacttcgcctgtgatatctacatctg |
| | | ggcgcccttggccgggacttgtggggtcct |
| | | tctcctgtcactggttatcaccctttactg |
| | | caaacggggcagaaagaaactcctgtatat |
| | | attcaaacaaccatttatgagaccagtaca |
| | | aactactcaagaggaagatggctgtagctg |
| | | ccgatttccagaagaagaagaaggaggatg |
| | | tgaactgagagtgaagttcagcaggagcgc |
| | | agacgcccccgcgtaccagcagggccagaa |
| | | ccagctctataacgagctcaatctaggacg |
| | | aagagaggagtacgatgttttggacaagag |
| | | acgtggccgggaccctgagatggggggaaa |
| | | gccgagaaggaagaaccctcaggaaggcct |
| | | gtacaatgaactgcagaaagataagatggc |
| | | ggaggcctacagtgagattgggatgaaagg |
| | | cgagcgccggaggggcaaggggcacgatgg |
| | | cctttaccagggtctcagtacagccaccaa |
| | | ggacacctacgacgcccttcacatgcaggc |
| | | cctgccccctcgc |
| Full length | 824 | MALPVTALLLPLALLLHAARPEVQLQQSGP |
| CD19-CD22 | | GLVKPSQTLSLTCAISGDSMLSNSDTWNWI |
| Dual CAR | | RQSPSRGLEWLGRTYHRSTWYDDYASSVRG |
| amino acid | | RVSINVDTSKNQYSLQLNAVTPEDTGVYYC |
| | | ARVRLQDGNSWSDAFDVWGQGTMVTVSSGG |
| | | GGSQSALTQPASASGSPGQSVTISCTGTSS |
| | | DVGGYNYVSWYQQHPGKAPKLMIYDVSNRP |
| | | SGVSNRFSGSKSGNTASLTISGLQAEDEAD |
| | | YYCSSYTSSSTLYVFGTGTQLTVLTTTPAP |
| | | RPPTPAPTIASQPLSLRPEACRPAAGGAVH |
| | | TRGLDFACDIYIWAPLAGTCGVLLLSLVIT |
| | | LYCKRGRKKLLYIFKQPFMRPVQTTQEEDG |
| | | CSCRFPEEEEGGCELRVKFSRSADAPAYQQ |
| | | GQNQLYNELNLGRREEYDVLDKRRGRDPEM |
| | | GGKPRRKNPQEGLYNELQKDKMAEAYSEIG |
| | | MKGERRRGKGHDGLYQGLSTATKDTYDALH |
| | | MQALPPRGSGATNFSLLKQAGDVEENPGPM |
| | | ALPVTALLLPLALLLHAARPEIVMTQSPAT |
| | | LSLSPGERATLSCRASQDISKYLNWYQQKP |
| | | GQAPRLLIYHTSRLHSGIPARFSGSGSGTD |
| | | YTLTISSLQPEDFAVYFCQQGNTLPYTFGQ |
| | | GTKLEIKGGGGSGGGGSGGGGSQVQLQESG |
| | | PGLVKPSETLSLTCTVSGVSLPDYGVSWIR |
| | | QPPGKGLEWIGVIWGSETTYYQSSLKSRVT |
| | | ISKDNSKNQVSLKLSSVTAADTAVYYCAKH |
| | | YYYGGSYAMDYWGQGTLVTVSSTTTPAPRP |
| | | PTPAPTIASQPLSLRPEACRPAAGGAVHTR |
| | | GLDFACDIYIWAPLAGTCGVLLLSLVITLY |
| | | CKRGRKKLLYIFKQPFMRPVQTTQEEDGCS |
| | | CRFPEEEEGGCELRVKFSRSADAPAYQQGQ |
| | | NQLYNELNLGRREEYDVLDKRRGRDPEMGG |
| | | KPRRKNPQEGLYNELQKDKMAEAYSEIGMK |
| | | GERRRGKGHDGLYQGLSTATKDTYDALHMQ |
| | | ALPPR |
| CD22 CAR | 825 | MALPVTALLLPLALLLHAARPEVQLQQSGP |
| (with P2A | | GLVKPSQTLSLTCAISGDSMLSNSDTWNWI |
| site) | | RQSPSRGLEWLGRTYHRSTWYDDYASSVRG |
| | | RVSINVDTSKNQYSLQLNAVTPEDTGVYYC |
| | | ARVRLQDGNSWSDAFDVWGQGTMVTVSSGG |
| | | GGSQSALTQPASASGSPGQSVTISCTGTSS |
| | | DVGGYNYVSWYQQHPGKAPKLMIYDVSNRP |
| | | SGVSNRFSGSKSGNTASLTISGLQAEDEAD |
| | | YYCSSYTSSSTLYVFGTGTQLTVLTTTPAP |
| | | RPPTPAPTIASQPLSLRPEACRPAAGGAVH |
| | | TRGLDFACDIYIWAPLAGTCGVLLLSLVIT |
| | | LYCKRGRKKLLYIFKQPFMRPVQTTQEEDG |
| | | CSCRFPEEEEGGCELRVKFSRSADAPAYQQ |
| | | GQNQLYNELNLGRREEYDVLDKRRGRDPEM |
| | | GGKPRRKNPQEGLYNELQKDKMAEAYSEIG |
| | | MKGERRRGKGHDGLYQGLSTATKDTYDALH |
| | | MQALPPRGSGATNFSLLKQAGDVEENPG |
| CD19 CAR | 826 | PMALPVTALLLPLALLLHAARPEIVMTQSP |
| | | ATLSLSPGERATLSCRASQDISKYLNWYQQ |
| | | KPGQAPRLLIYHTSRLHSGIPARFSGSGSG |
| | | TDYTLTISSLQPEDFAVYFCQQGNTLPYTF |
| | | GQGTKLEIKGGGGSGGGGSGGGGSQVQLQE |
| | | SGPGLVKPSETLSLTCTVSGVSLPDYGVSW |
| | | IRQPPGKGLEWIGVIWGSETTYYQSSLKSR |
| | | VTISKDNSKNQVSLKLSSVTAADTAVYYCA |
| | | KHYYYGGSYAMDYWGQGTLVTVSSTTTPAP |
| | | RPPTPAPTIASQPLSLRPEACRPAAGGAVH |
| | | TRGLDFACDIYIWAPLAGTCGVLLLSLVIT |
| | | LYCKRGRKKLLYIFKQPFMRPVQTTQEEDG |
| | | CSCRFPEEEEGGCELRVKFSRSADAPAYQQ |
| | | GQNQLYNELNLGRREEYDVLDKRRGRDPEM |
| | | GGKPRRKNPQEGLYNELQKDKMAEAYSEIG |
| | | MKGERRRGKGHDGLYQGLSTATKDTYDALH |
| | | MQALPPR |

CG#c203

| | | |
|---|---|---|
| Full length | 827 | atggccttaccagtgaccgccttgctcctg |
| CD19-CD22 | | ccgctggccttgctgctccacgccgccagg |
| Dual CAR | | ccggaaattgtgatgacccagtcacccgcc |
| nucleic | | actcttagcctttcacccggtgagcgcgca |
| acid | | accctgtcttgcagagcctoccaagacatc |
| | | tcaaaataccttaattggtatcaacagaag |
| | | cccggacaggctcctcgccttctgatctac |
| | | cacaccagccggctccattctggaatccct |
| | | gccaggttcagcggtagcggatctgggacc |
| | | gactacaccctcactatcagctcactgcag |
| | | ccagaggacttcgctgtctatttctgtcag |
| | | caagggaacaccctgccctacacctttgga |
| | | cagggcaccaagctcgagattaaaggtgga |
| | | ggtggcagcggaggaggtgggtccggcggt |
| | | ggaggaagccaggtccaactccaagaaagc |
| | | ggaccgggtcttgtgaagccatcagaaact |
| | | ctttcactgacttgtactgtgagcggagtg |
| | | tctctccccgattacggggtgtcttggatc |
| | | agacagccaccggggaagggtctggaatgg |
| | | attggagtgatttggggctctgagactact |
| | | tactaccaatcatccctcaagtcacgcgtc |
| | | accatctcaaaggacaactctaagaatcag |
| | | gtgtcactgaaactgtcatctgtgaccgca |
| | | gccgacaccgccgtgtactattgcgctaag |
| | | cattactattatggcgggagctacgcaatg |
| | | gattactggggacagggtactctggtcacc |
| | | gtgtccagcaccacgacgccagcgccgcga |
| | | ccaccaacaccggcgcccaccatcgcgtcg |
| | | cagcccctgtccctgcgcccagaggcgtgc |
| | | cggccagcggggggggcgcagtgcacacga |
| | | gggggctggacttcgcctgtgatatctaca |
| | | tctgggcgcccttggccgggacttgtgggg |
| | | tccttctcctgtcactggttatcacccttt |
| | | actgcaaacggggcagaaagaaactcctgt |
| | | atatattcaaacaaccatttatgagaccag |
| | | tacaaactactcaagaggaagatggctgta |
| | | gctgccgatttccagaagaagaagaaggag |
| | | gatgtgaactgagagtgaagttcagcagga |
| | | gcgcagacgcccccgcgtaccagcagggcc |
| | | agaaccagctctataacgagctcaatctag |
| | | gacgaagagaggagtacgatgttttggaca |
| | | agagacgtggccgggaccctgagatggggg |
| | | gaaagccgagaaggaagaaccctcaggaag |
| | | gcctgtacaatgaactgcagaaagataaga |
| | | tggcggaggcctacagtgagattgggatga |
| | | aaggcgagcgccggaggggcaaggggcacg |
| | | atggcctttaccagggtctcagtacagcca |
| | | ccaaggacacctacgacgcccttcacatgc |
| | | aggccctgccccctcgcggaagcggagcta |
| | | ctaacttcagcctgctgaagcaggctggag |
| | | acgtggaggagaaccctggacctatggccc |
| | | tccctgtcaccgccctgctgcttccgctgg |
| | | ctcttctgctccacgccgctcggcccgaag |
| | | tgcagctgcagcagtcagggcctggcctgg |
| | | tcaagccgtcgcagaccctctccctgacat |
| | | gcgccattagcggggactccatgctgagca |
| | | actcggacacctggaactggattcggcagt |
| | | ccccttcccggggactcgagtggctcggac |
| | | gcacctaccatcggagcacttggtacgacg |
| | | actacgcctcctccgtgagaggtcgcgtgt |
| | | cgatcaacgtggatacctcgaagaaccagt |
| | | atagcttgcaactgaacgccgtgacccctg |
| | | aggataccggagtgtactattgtgcgagag |
| | | tcaggctgcaagacggaaactcctggtccg |
| | | acgcatttgatgtctggggacagggtacta |
| | | tggtcacggtgtcatctggaggcggaggat |
| | | cgcaaagcgccctgactcagccggcttcgg |
| | | ctagcggttcaccggggcagtccgtgacta |
| | | tctcctgcaccgggacttcctccgacgtgg |
| | | gaggctacaattacgtgtcctggtaccagc |
| | | aacaccccggcaaagccccaaagctgatga |
| | | tctacgacgtcagcaacagacccagcggag |
| | | tgtccaaccggttcagcggctccaagtccg |
| | | gcaacaccgcctccctgaccatcagcgggc |
| | | ttcaggccgaagatgaggcggattactact |
| | | gctcctcgtacacctcaagctcaactctgt |
| | | acgtgttcggcaccggtactcagctcaccg |
| | | tgctgaccactaccccagcaccgaggccac |
| | | ccaccccggctcctaccatcgcctcccagc |
| | | ctctgtccctgcgtccggaggcatgtagac |
| | | ccgcagctggtggggccgtgcatacccggg |
| | | gtcttgacttcgcctgcgatatctacattt |
| | | gggcccctctggctggtacttgcggggtcc |
| | | tgctgctttcactcgtgatcactctttact |
| | | gtaagcgcggtcggaagaagctgctgtaca |
| | | tctttaagcaacccttcatgaggcctgtgc |
| | | agactactcaagaggaggacggctgttcat |
| | | gccggttcccagaggaggaggaaggcggct |
| | | gcgaactgcgcgtgaaattcagccgcagcg |
| | | cagatgctccagcctaccagcaggggcaga |
| | | accagctctacaacgaactcaatcttggtc |
| | | ggagagaggagtacgacgtgctggacaagc |
| | | ggagaggacgggacccagaaatggggggaa |
| | | gccgcgcagaaagaatccccaagagggcct |
| | | gtacaacgagctccaaaaggataagatggc |
| | | agaagcctatagcgagattggtatgaaagg |
| | | ggaacgcagaagaggcaaaggccacgacgg |
| | | actgtaccagggactcagcaccgccaccaa |
| | | ggacacctatgacgctcttcacatgcaggc |
| | | cctgccgcctcgg |
| Full length | 828 | MALPVTALLLPLALLLHAARPEIVMTQSPA |
| CD19-CD22 | | TLSLSPGERATLSCRASQDISKYLNWYQQK |
| Dual CAR | | PGQAPRLLIYHTSRLHSGIPARFSGSGSGT |
| amino acid | | DYTLTISSLQPEDFAVYFCQQGNTLPYTFG |
| | | QGTKLEIKGGGGSGGGGSGGGGSQVQLQES |
| | | GPGLVKPSETLSLTCTVSGVSLPDYGVSWI |
| | | RQPPGKGLEWIGVIWGSETTYYQSSLKSRV |
| | | TISKDNSKNQVSLKLSSVTAADTAVYYCAK |
| | | HYYYGGSYAMDYWGQGTLVTVSSTTTPAPR |
| | | PPTPAPTIASQPLSLRPEACRPAAGGAVHT |
| | | RGLDFACDIYIWAPLAGTCGVLLLSLVITL |
| | | YCKRGRKKLLYIFKQPFMRPVQTTQEEDGC |
| | | SCRFPEEEEGGCELRVKFSRSADAPAYQQG |
| | | QNQLYNELNLGRREEYDVLDKRRGRDPEMG |
| | | GKPRRKNPQEGLYNELQKDKMAEAYSEIGM |
| | | KGERRRGKGHDGLYQGLSTATKDTYDALHM |
| | | QALPPRGSGATNFSLLKQAGDVEENPGPMA |
| | | LPVTALLLPLALLLHAARPEVQLQQSGPGL |
| | | VKPSQTLSLTCAISGDSMLSNSDTWNWIRQ |
| | | SPSRGLEWLGRTYHRSTWYDDYASSVRGRV |
| | | SINVDTSKNQYSLQLNAVTPEDTGVYYCAR |
| | | VRLQDGNSWSDAFDVWGQGTMVTVSSGGGG |
| | | SQSALTQPASASGSPGQSVTISCTGTSSDV |
| | | GGYNYVSWYQQHPGKAPKLMIYDVSNRPSG |
| | | VSNRFSGSKSGNTASLTISGLQAEDEADYY |
| | | CSSYTSSSTLYVFGTGTQLTVLTTTPAPRP |
| | | PTPAPTIASQPLSLRPEACRPAAGGAVHTR |
| | | GLDFACDIYIWAPLAGTCGVLLLSLVITLY |
| | | CKRGRKKLLYIFKQPFMRPVQTTQEEDGCS |
| | | CRFPEEEEGGCELRVKFSRSADAPAYQQGQ |
| | | NQLYNELNLGRREEYDVLDKRRGRDPEMGG |
| | | KPRRKNPQEGLYNELQKDKMAEAYSEIGMK |
| | | GERRRGKGHDGLYQGLSTATKDTYDALHMQ |
| | | ALPPR |
| CD19 CAR | 829 | MALPVTALLLPLALLLHAARPEIVMTQSPA |
| (with P2A | | TLSLSPGERATLSCRASQDISKYLNWYQQK |
| site) | | PGQAPRLLIYHTSRLHSGIPARFSGSGSGT |
| | | DYTLTISSLQPEDFAVYFCQQGNTLPYTFG |
| | | QGTKLEIKGGGGSGGGGSGGGGSQVQLQES |
| | | GPGLVKPSETLSLTCTVSGVSLPDYGVSWI |
| | | RQPPGKGLEWIGVIWGSETTYYQSSLKSRV |
| | | TISKDNSKNQVSLKLSSVTAADTAVYYCAK |
| | | HYYYGGSYAMDYWGQGTLVTVSSTTTPAPR |
| | | PPTPAPTIASQPLSLRPEACRPAAGGAVHT |
| | | RGLDFACDIYIWAPLAGTCGVLLLSLVITL |
| | | YCKRGRKKLLYIFKQPFMRPVQTTQEEDGC |
| | | SCRFPEEEEGGCELRVKFSRSADAPAYQQG |
| | | QNQLYNELNLGRREEYDVLDKRRGRDPEMG |
| | | GKPRRKNPQEGLYNELQKDKMAEAYSEIGM |
| | | KGERRRGKGHDGLYQGLSTATKDTYDALHM |
| | | QALPPRGSGATNFSLLKQAGDVEENPG |
| CD22 CAR | 830 | PMALPVTALLLPLALLLHAARPEVQLQQSG |
| | | PGLVKPSQTLSLTCAISGDSMLSNSDTWNW |
| | | IRQSPSRGLEWLGRTYHRSTWYDDYASSVR |
| | | GRVSINVDTSKNQYSLQLNAVTPEDTGVYY |
| | | CARVRLQDGNSWSDAFDVWGQGTMVTVSSG |
| | | GGGSQSALTQPASASGSPGQSVTISCTGTS |
| | | SDVGGYNYVSWYQQHPGKAPKLMIYDVSNR |
| | | PSGVSNRFSGSKSGNTASLTISGLQAEDEA |
| | | DYYCSSYTSSSTLYVFGTGTQLTVLTTTPA |
| | | PRPPTPAPTIASQPLSLRPEACRPAAGGAV |
| | | HTRGLDFACDIYIWAPLAGTCGVLLLSLVI |
| | | TLYCKRGRKKLLYIFKQPFMRPVQTTQEED |
| | | GCSCRFPEEEEGGCELRVKFSRSADAPAYQ |
| | | QGQNQLYNELNLGRREEYDVLDKRRGRDPE |
| | | MGGKPRRKNPQEGLYNELQKDKMAEAYSEI |
| | | GMKGERRRGKGHDGLYQGLSTATKDTYDAL |
| | | HMQALPPR |

CG#c230

| | | |
|---|---|---|
| Full length | 831 | atggcacttcccgtcaccgccctgctgctc |
| CD19-CD22 | | ccactcgccctccttctgcacgccgcccgc |
| Dual CAR | | cccgaagtgcagctgcagcagtcaggaccg |
| nucleic | | ggcctggtcaaaccttcgcagactctgtcc |
| acid | | ctgacttgcgctataagcggggactccatg |
| | | ctgagcaattcggacacttggaactggatt |
| | | cgccaaagccccagccggggtctggaatgg |
| | | ctgggaaggacctaccatcgctctacttgg |
| | | tacgacgactacgccagctccgtgcgagga |
| | | cgcgtgtccatcaacgtggacacctccaag |
| | | aaccagtactcgcttcaactcaacgcagtg |
| | | acccctgaagataccggagtctactattgc |
| | | gcccgcgtgcggctccaggacgggaactcc |
| | | tggtcggacgctttcgatgtctggggacag |
| | | ggcactatggtcaccgtcagctccggcggc |
| | | ggcggtagccaatcggcgctgacacagccg |
| | | gcttccgcctcgggatcgcctggacagtcg |
| | | gtgaccatctcgtgcactggaacctcctcc |
| | | gacgtgggggctacaattatgtgtcatggt |
| | | accagcagcacccgggaaaggcccctaagc |
| | | tgatgatctacgacgtgtccaatagaccta |
| | | gcggggtgtcaaacagattctcoggatcca |
| | | aatccggaaacactgcctccctgaccattt |
| | | ccggactgcaggccgaggacgaagccgatt |
| | | actactgctcctcttacacctcctcatcca |
| | | ccctctacgtgtttgggactgggacccagc |
| | | tgaccgtcctcactaccaccccggccccgc |
| | | ggccccctacaccggcaccgactattgcca |
| | | gccagcctctctcgctgcggccggaggcct |
| | | gccgcccagccgccggcggagccgtgcaca |
| | | cccgcggtctggacttcgcgtgcgatatct |
| | | acatctgggctccgctggccgggacttgtg |
| | | gcgtgctgctgctgtctctggtcatcacac |
| | | tgtactgcaagcgcggaagaaagaagctgc |
| | | tctacatcttcaagcaacccttcatgcggc |
| | | ctgtgcagaccacccaggaagaggatggct |
| | | gctcctgccggttcccggaggaagaagagg |
| | | gcggatgcgaactgcgcgtgaagttcagcc |
| | | gaagcgccgacgccccggcctaccagcagg |
| | | gccagaaccaactgtacaacgaactcaacc |
| | | tgggtcggagagaagagtacgacgtgctgg |
| | | acaaaagacgcggcagggaccccgagatgg |
| | | gcggaaagcctcgccgcaagaacccgcagg |
| | | agggcctctacaacgagctgcagaaggaca |
| | | agatggccgaagcctactcagagatcggca |
| | | tgaagggggagcggaggcgcgggaagggcc |
| | | acgacggtttgtaccaaggactttccactg |
| | | cgaccaaggacacctacgatgccctccata |
| | | tgcaagccctgccgccccggggttccggag |
| | | ctaccaacttctcgctgttgaagcaggccg |
| | | gagatgtcgaggaaaacccgggacctatgg |
| | | ccctgccagtgaccgcgctcctgctgcccc |
| | | tggctctgctgcttcacgcggcccggcctg |
| | | agattgtgatgactcagagcccggcgaccc |
| | | tgtccctgtcccccggggagagagcaaccc |
| | | tgtcgtgccgggcctoccaagacatctcaa |
| | | agtacctcaattggtatcagcagaagccag |
| | | gacaggctccacggttgctgatctaccaca |
| | | cttcgagactgcactcaggaatccccgcgc |
| | | ggttttccggttccggctccgggaccgact |
| | | acaccctgaccatcagctcgctccagcctg |
| | | aggatttcgcagtgtacttctgtcagcaag |
| | | gaaacacccttccatacaccttcggacagg |
| | | gtaccaagctggaaatcaagggaggaggag |
| | | gatctgggggcggtggttccggaggcggtg |
| | | gaagccaagtgcagctccaggaaagcggac |
| | | ccgggctggtcaagccgagcgaaaccctct |
| | | cactgacttgtactgtgtccggagtgtccc |
| | | tgcctgactatggagtgtcctggatccgac |
| | | agccccccggaaagggtctggagtggattg |
| | | gggtcatctggggctccgaaactacctact |
| | | accagagcagcctcaagagccgggtcacca |
| | | tttcaaaggataactccaagaatcaagtgt |
| | | ccctgaagctgtcctcagtgacagccgcag |
| | | acaccgccgtgtactactgcgccaagcact |
| | | actactacggaggctcctacgcaatggact |
| | | actggggacaaggcactttggtcactgtgt |
| | | caagcaccaccacccctgcgcctcggcctc |
| | | ctaccccggctcccactatcgcgagccagc |
| | | cgctgagcctgcggcctgaggcttgccgac |
| | | cggccgctggcggcgccgtgcatactcggg |
| | | gcctcgactttgcctgtgacatctacatct |
| | | gggcccccctggccggaacgtgcggagtgc |
| | | tgctgctgtcgctggtcattaccctgtatt |
| | | gcaaacgcggaaggaagaagctgttgtaca |
| | | ttttcaagcagcccttcatgcgcccggtgc |
| | | aaactactcaggaggaagatggctgttcct |
| | | gtcggttccccgaagaggaagaaggcggct |
| | | gcgagttgagggtcaagttctcccggtccg |
| | | ccgatgctcccgcctaccaacaggggcaga |
| | | accagctttataacgaactgaacctgggca |
| | | ggagggaggaatatgatgtgttggataagc |
| | | gccggggccgggacccagaaatggggggaa |
| | | agcccagaagaaagaaccctcaagagggac |
| | | tttacaacgaattgcagaaagacaaaatgg |
| | | ccgaggcctactccgagattgggatgaagg |
| | | gcgaaagacggagaggaaaggggcacgacg |
| | | ggctctaccagggactcagcaccgccacca |
| | | aagatacctacgacgccctgcatatgcagg |
| | | cgctgccgccgcgc |
| Full length | 824 | MALPVTALLLPLALLLHAARPEVQLQQSGP |
| CD19-CD22 | | GLVKPSQTLSLTCAISGDSMLSNSDTWNWI |
| Dual CAR | | RQSPSRGLEWLGRTYHRSTWYDDYASSVRG |
| amino acid | | RVSINVDTSKNQYSLQLNAVTPEDTGVYYC |
| | | ARVRLQDGNSWSDAFDVWGQGTMVTVSSGG |
| | | GGSQSALTQPASASGSPGQSVTISCTGTSS |
| | | DVGGYNYVSWYQQHPGKAPKLMIYDVSNRP |
| | | SGVSNRFSGSKSGNTASLTISGLQAEDEAD |
| | | YYCSSYTSSSTLYVFGTGTQLTVLTTTPAP |
| | | RPPTPAPTIASQPLSLRPEACRPAAGGAVH |
| | | TRGLDFACDIYIWAPLAGTCGVLLLSLVIT |
| | | LYCKRGRKKLLYIFKQPFMRPVQTTQEEDG |
| | | CSCRFPEEEEGGCELRVKFSRSADAPAYQQ |
| | | GQNQLYNELNLGRREEYDVLDKRRGRDPEM |
| | | GGKPRRKNPQEGLYNELQKDKMAEAYSEIG |
| | | MKGERRRGKGHDGLYQGLSTATKDTYDALH |
| | | MQALPPRGSGATNFSLLKQAGDVEENPGPM |
| | | ALPVTALLLPLALLLHAARPEIVMTQSPAT |
| | | LSLSPGERATLSCRASQDISKYLNWYQQKP |
| | | GQAPRLLIYHTSRLHSGIPARFSGSGSGTD |
| | | YTLTISSLQPEDFAVYFCQQGNTLPYTFGQ |
| | | GTKLEIKGGGGSGGGGSGGGGSQVQLQESG |
| | | PGLVKPSETLSLTCTVSGVSLPDYGVSWIR |
| | | QPPGKGLEWIGVIWGSETTYYQSSLKSRVT |
| | | ISKDNSKNQVSLKLSSVTAADTAVYYCAKH |
| | | YYYGGSYAMDYWGQGTLVTVSSTTTPAPRP |
| | | PTPAPTIASQPLSLRPEACRPAAGGAVHTR |
| | | GLDFACDIYIWAPLAGTCGVLLLSLVITLY |
| | | CKRGRKKLLYIFKQPFMRPVQTTQEEDGCS |
| | | CRFPEEEEGGCELRVKFSRSADAPAYQQGQ |
| | | NQLYNELNLGRREEYDVLDKRRGRDPEMGG |
| | | KPRRKNPQEGLYNELQKDKMAEAYSEIGMK |
| | | GERRRGKGHDGLYQGLSTATKDTYDALHMQ |
| | | ALPPR |
| CD22 CAR | 825 | MALPVTALLLPLALLLHAARPEVQLQQSGP |
| (with P2A | | GLVKPSQTLSLTCAISGDSMLSNSDTWNWI |
| site) | | RQSPSRGLEWLGRTYHRSTWYDDYASSVRG |
| | | RVSINVDTSKNQYSLQLNAVTPEDTGVYYC |
| | | ARVRLQDGNSWSDAFDVWGQGTMVTVSSGG |
| | | GGSQSALTQPASASGSPGQSVTISCTGTSS |
| | | DVGGYNYVSWYQQHPGKAPKLMIYDVSNRP |
| | | SGVSNRFSGSKSGNTASLTISGLQAEDEAD |
| | | YYCSSYTSSSTLYVFGTGTQLTVLTTTPAP |
| | | RPPTPAPTIASQPLSLRPEACRPAAGGAVH |
| | | TRGLDFACDIYIWAPLAGTCGVLLLSLVIT |
| | | LYCKRGRKKLLYIFKQPFMRPVQTTQEEDG |
| | | CSCRFPEEEEGGCELRVKFSRSADAPAYQQ |
| | | GQNQLYNELNLGRREEYDVLDKRRGRDPEM |
| | | GGKPRRKNPQEGLYNELQKDKMAEAYSEIG |
| | | MKGERRRGKGHDGLYQGLSTATKDTYDALH |
| | | MQALPPRGSGATNFSLLKQAGDVEENPG |
| CD19 CAR | 826 | PMALPVTALLLPLALLLHAARPEIVMTQSP |
| | | ATLSLSPGERATLSCRASQDISKYLNWYQQ |
| | | KPGQAPRLLIYHTSRLHSGIPARFSGSGSG |
| | | TDYTLTISSLQPEDFAVYFCQQGNTLPYTF |
| | | GQGTKLEIKGGGGSGGGGSGGGGSQVQLQE |
| | | SGPGLVKPSETLSLTCTVSGVSLPDYGVSW |
| | | IRQPPGKGLEWIGVIWGSETTYYQSSLKSR |
| | | VTISKDNSKNQVSLKLSSVTAADTAVYYCA |
| | | KHYYYGGSYAMDYWGQGTLVTVSSTTTPAP |
| | | RPPTPAPTIASQPLSLRPEACRPAAGGAVH |
| | | TRGLDFACDIYIWAPLAGTCGVLLLSLVIT |
| | | LYCKRGRKKLLYIFKQPFMRPVQTTQEEDG |
| | | CSCRFPEEEEGGCELRVKFSRSADAPAYQQ |
| | | GQNQLYNELNLGRREEYDVLDKRRGRDPEM |
| | | GGKPRRKNPQEGLYNELQKDKMAEAYSEIG |
| | | MKGERRRGKGHDGLYQGLSTATKDTYDALH |
| | | MQALPPR |

[0576] CD22 and CD19 CDRs of a dual CAR of the disclosure (e.g., a dual CAR molecule comprising (i) a first CAR that binds to CD22 and (ii) a second CAR that binds to CD19) are provided in Table 31.

TABLE 31
CD22 and CD19 CDR sequences

| | | |
|---|---|---|
| | SEQ ID | |
| Identifier | NO | Sequence |

CD22 CDRs

| | | |
|---|---|---|
| HCDR1 | 745 | SNSDTWN |
| (Kabat) | | |
| HCDR2 | 746 | RTYHRSTWYDDYASSVRG |
| (Kabat) | | |
| HCDR3 | 748 | VRLQDGNSWSDAFDV |
| (Kabat) | | |
| HCDR1 | 832 | GDSMLSNSD |
| (Chothia) | | |
| HCDR2 | 833 | YHRSTWY |
| (Chothia) | | |
| HCDR3 | 748 | VRLQDGNSWSDAFDV |
| (Chothia) | | |
| HCDR1 | 834 | GDSMLSNSDT |
| (IMGT) | | |
| HCDR2 | 835 | TYHRSTWYD |
| (IMGT) | | |
| HCDR3 | 836 | ARVRLQDGNSWSDAFDV |
| (IMGT) | | |
| LCDR1 (Kabat) | 95 | TGTSSDVGGYNYVS |
| LCDR2 (Kabat) | 96 | DVSNRPS |
| LCDR3 (Kabat) | 97 | SSYTSSSTLYV |
| LCDR1 | 98 | TSSDVGGYNY |
| (Chothia) | | |
| LCDR2 | 99 | DVS |
| (Chothia) | | |
| LCDR3 | 100 | YTSSSTLY |
| (Chothia) | | |
| LCDR1 | 101 | SSDVGGYNY |
| (IMGT) | | |
| LCDR2 | 99 | DVS |
| (IMGT) | | |
| LCDR3 | 97 | SSYTSSSTLYV |
| (IMGT) | | |

CD19 CDRs

| | | |
|---|---|---|
| HCDR1 | 837 | GVSLPDYGVS |
| (Kabat) | | |
| HCDR2 | 838 | VIWGSETTYYSSSLKS |
| (Kabat) | 687 | VIWGSETTYYQSSLKS |
| | 839 | VIWGSETTYYNSSLKS |
| HCDR3 | 762 | HYYYGGSYAMDY |
| (Kabat) | | |
| LCDR1 | 763 | RASQDISKYLN |
| LCDR2 | 764 | HTSRLHS |
| LCDR3 | 300 | QQGNTLPYT |

[0577] Table 32 provides nucleotide and amino acid sequence for CD19 and CD22 binding domains of a dual CAR or a tandem CAR disclosed herein, e.g., a dual CAR or a tandem CAR comprising (i) a first CAR that binds to CD22 and (ii) a second CAR that binds to CD19.

TABLE 32
CD19 and CD22 binding domains

| | SEQ ID | |
|---|---|---|
| Identifier | NO | Sequence |
| scFv CAR19 | 840 | gaaattgtgatgacccagtcacccgccactcttagcctttcacccggtgagcgcgcaaccctgtctt |
| in c201, c203 | | gcagagcctcccaagacatctcaaaataccttaattggtatcaacagaagcccggacaggctcctc |
| and tandem | | gccttctgatctaccacaccagccggctccattctggaatccctgccaggttcagcggtagcggat |
| CARs c171, | | ctgggaccgactacaccctcactatcagctcactgcagccagaggacttcgctgtctatttctgtca |
| c182, c188 | | gcaagggaacaccctgccctacacctttggacagggcaccaagctcgagattaaaggtggaggt |
| | | ggcagcggaggaggtgggtccggcggtggaggaagccaggtccaactccaagaaagcggac |
| | | cgggtcttgtgaagccatcagaaactctttcactgacttgtactgtgagcggagtgtctctccccgat |
| | | tacggggtgtcttggatcagacagccaccggggaagggtctggaatggattggagtgatttgggg |
| | | ctctgagactacttactaccaatcatccctcaagtcacgcgtcaccatctcaaaggacaactctaag |
| | | aatcaggtgtcactgaaactgtcatctgtgaccgcagccgacaccgccgtgtactattgcgctaag |
| | | cattactattatggcgggagctacgcaatggattactggggacagggtactctggtcaccgtgtcca |
| | | gc |
| | 758 | EIVMTQSPATLSLSPGERATLSCRASQDISKYLNWYQQKPGQA |
| | | PRLLIYHTSRLHSGIPARFSGSGSGTDYTLTISSLQPEDFAVYFC |
| | | QQGNTLPYTFGQGTKLEIKGGGGSGGGGSGGGGSQVQLQESG |
| | | PGLVKPSETLSLTCTVSGVSLPDYGVSWIRQPPGKGLEWIGVI |
| | | WGSETTYYQSSLKSRVTISKDNSKNQVSLKLSSVTAADTAVY |
| | | YCAKHYYYGGSYAMDYWGQGTLVTVSS |
| scFv CAR19 | 841 | gagattgtcatgactcagtccccggccacactctccctgtcacccggagaaagagcaaccctgag |
| in c224 | | ctgcagggcgtcccaggacatctcgaagtacctgaactggtaccagcagaagcctggacaagca |
| | | ccccgcctcctgatctaccacacctcgcggctgcattcgggaatccccgccagattctcagggag |
| | | cggatcaggaaccgactacaccctgactatctcgagcctgcaaccagaggatttcgccgtgtactt |
| | | ctgccagcaaggaaacaccctgccctacacctttggacagggaaccaagctcgagattaagggg |
| | | ggtggtggatcgggagggggtggatcaggaggaggcggctcacaagtccagctgcaagaatcc |
| | | ggtccgggacttgtgaagccgtccgaaaccctgtcactgacttgcactgtgtccggggtgtcattg |
| | | cccgactacggcgtgagctggattcggcagccccctggaaagggattggaatggatcggcgtga |
| | | tctggggttcggaaactacctactatcagtcctcactgaagtcccgcgtgaccatcagcaaggata |
| | | attccaaaaaccaagtgtctctgaagctctccagcgtcactgccgccgatactgccgtgtactactg |
| | | cgccaagcactactattacggggttcgtacgccatggactactggggccaagggacactcgtga |
| | | ccgtgtcatcc |
| | 758 | EIVMTQSPATLSLSPGERATLSCRASQDISKYLNWYQQKPGQA |
| | | PRLLIYHTSRLHSGIPARFSGSGSGTDYTLTISSLQPEDFAVYFC |
| | | QQGNTLPYTFGQGTKLEIKGGGGSGGGGSGGGGSQVQLQESG |
| | | PGLVKPSETLSLTCTVSGVSLPDYGVSWIRQPPGKGLEWIGVI |
| | | WGSETTYYQSSLKSRVTISKDNSKNQVSLKLSSVTAADTAVY |
| | | YCAKHYYYGGSYAMDYWGQGTLVTVSS |
| scFv CAR19 | 842 | caagtccagctgcaagaatccggtccgggacttgtgaagccgtccgaaaccctgtcactgacttg |
| in c227 | | cactgtgtccggggtgtcattgcccgactacggcgtgagctggattcggcagccccctggaaagg |
| | | gattggaatggatcggcgtgatctggggttcggaaactacctactatcagtcctcactgaagtcccg |
| | | cgtgaccatcagcaaggataattccaaaaaccaagtgtctctgaagctctccagcgtcactgccgc |
| | | cgatactgccgtgtactactgcgccaagcactactattacggggttcgtacgccatggactactgg |
| | | ggacaaggcactcttgtgactgtgtcaagcggcggtggagggagcggtgggggcggttcagga |
| | | ggaggcggatcagagatcgtgatgacccaatccccagccaccctgtccctcagccctggagaaa |
| | | gagccaccctgagctgccgggcctcccaggatatcagcaagtacttgaactggtaccaacaaaa |
| | | gccggggcaggcgccccggctcctgatctaccacacctcgcgcctccactcaggtatccccgcc |
| | | agattctcagggagcggctccggtactgactacaccctgactatttcctcactgcagccagaggac |
| | | tttgccgtgtacttctgccagcagggaaacactctgccgtacaccttcgggcagggaacgaagctt |
| | | gaaattaag |
| | 843 | QVQLQESGPGLVKPSETLSLTCTVSGVSLPDYGVSWIRQPPGK |
| | | GLEWIGVIWGSETTYYQSSLKSRVTISKDNSKNQVSLKLSSVT |
| | | AADTAVYYCAKHYYYGGSYAMDYWGQGTLVTVSSGGGGS |
| | | GGGGSGGGGSEIVMTQSPATLSLSPGERATLSCRASQDISKYL |
| | | NWYQQKPGQAPRLLIYHTSRLHSGIPARFSGSGSGTDYTLTISS |
| | | LQPEDFAVYFCQQGNTLPYTFGQGTKLEIK |
| scFv CAR19 | 844 | gagattgtgatgactcagagcccggcgaccctgtccctgtcccccggggagagagcaaccctgt |
| in c230 | | cgtgccgggcctcccaagacatctcaaagtacctcaattggtatcagcagaagccaggacaggct |
| | | ccacggttgctgatctaccacacttcgagactgcactcaggaatccccgcgcggttttccggttccg |
| | | gctccgggaccgactacaccctgaccatcagctcgctccagcctgaggatttcgcagtgtacttct |
| | | gtcagcaaggaaacacccttccatacaccttcggacagggtaccaagctggaaatcaagggagg |
| | | aggaggatctgggggcggtggttccggaggcggtggaagccaagtgcagctccaggaaagcg |
| | | gacccgggctggtcaagccgagcgaaaccctctcactgacttgtactgtgtccggagtgtccctgc |
| | | ctgactatggagtgtcctggatccgacagccccccggaaagggtctggagtggattggggtcatc |
| | | tggggctccgaaactacctactaccagagcagcctcaagagccgggtcaccatttcaaaggataa |
| | | ctccaagaatcaagtgtccctgaagctgtcctcagtgacagccgcagacaccgccgtgtactactg |
| | | cgccaagcactactactacggaggctcctacgcaatggactactggggacaaggcactttggtca |
| | | ctgtgtcaagc |
| | 758 | EIVMTQSPATLSLSPGERATLSCRASQDISKYLNWYQQKPGQA |
| | | PRLLIYHTSRLHSGIPARFSGSGSGTDYTLTISSLQPEDFAVYFC |
| | | QQGNTLPYTFGQGTKLEIKGGGGSGGGGSGGGGSQVQLQESG |
| | | PGLVKPSETLSLTCTVSGVSLPDYGVSWIRQPPGKGLEWIGVI |
| | | WGSETTYYQSSLKSRVTISKDNSKNQVSLKLSSVTAADTAVY |
| | | YCAKHYYYGGSYAMDYWGQGTLVTVSS |
| ScFVCAR22 | 845 | gaagtgcagctgcagcagtcagggcctggcctggtcaagccgtcgcagaccctctccctgacat |
| in c201 and | | gcgccattagcggggactccatgctgagcaactcggacacctggaactggattcggcagtcccct |
| c203 | | tcccggggactcgagtggctcggacgcacctaccatcggagcacttggtacgacgactacgcct |
| | | cctccgtgagaggtcgcgtgtcgatcaacgtggatacctcgaagaaccagtatagcttgcaactga |
| | | acgccgtgacccctgaggataccggagtgtactattgtgcgagagtcaggctgcaagacggaaa |
| | | ctcctggtccgacgcatttgatgtctggggacagggtactatggtcacggtgtcatctggaggcgg |
| | | aggatcgcaaagcgccctgactcagccggcttcggctagcggttcaccggggcagtccgtgact |
| | | atctcctgcaccgggacttcctccgacgtgggaggctacaattacgtgtcctggtaccagcaacac |
| | | cccggcaaagccccaaagctgatgatctacgacgtcagcaacagacccagcggagtgtccaac |
| | | cggttcagcggctccaagtccggcaacaccgcctccctgaccatcagcgggcttcaggccgaag |
| | | atgaggcggattactactgctcctcgtacacctcaagctcaactctgtacgtgttcggcaccggtact |
| | | cagctcaccgtgctg |
| | 846 | EVQLQQSGPGLVKPSQTLSLTCAISGDSMLSNSDTWNWIRQSP |
| | | SRGLEWLGRTYHRSTWYDDYASSVRGRVSINVDTSKNQYSL |
| | | QLNAVTPEDTGVYYCARVRLQDGNSWSDAFDVWGQGTMVT |
| | | VSSGGGGSQSALTQPASASGSPGQSVTISCTGTSSDVGGYNYV |
| | | SWYQQHPGKAPKLMIYDVSNRPSGVSNRFSGSKSGNTASLTIS |
| | | GLQAEDEADYYCSSYTSSSTLYVFGTGTQLTVL |
| ScFVCAR22 | 847 | gaagtgcagctgcagcagtcaggaccgggcctggtcaaaccttcgcagactctgtccctgacttg |
| in 230 | | cgctataagcggggactccatgctgagcaattcggacacttggaactggattcgccaaagcccca |
| | | gccggggtctggaatggctgggaaggacctaccatcgctctacttggtacgacgactacgccagc |
| | | tccgtgcgaggacgcgtgtccatcaacgtggacacctccaagaaccagtactcgcttcaactcaa |
| | | cgcagtgacccctgaagataccggagtctactattgcgcccgcgtgcggctccaggacgggaac |
| | | tcctggtcggacgctttcgatgtctggggacagggcactatggtcaccgtcagctccggcggcgg |
| | | cggtagccaatcggcgctgacacagccggcttccgcctcgggatcgcctggacagtcggtgacc |
| | | atctcgtgcactggaacctcctccgacgtgggcggctacaattatgtgtcatggtaccagcagcac |
| | | ccgggaaaggcccctaagctgatgatctacgacgtgtccaatagacctagcggggtgtcaaaca |
| | | gattctccggatccaaatccggaaacactgcctccctgaccatttccggactgcaggccgaggac |
| | | gaagccgattactactgctcctcttacacctcctcatccaccctctacgtgtttgggactgggaccca |
| | | gctgaccgtcctc |
| | 846 | EVQLQQSGPGLVKPSQTLSLTCAISGDSMLSNSDTWNWIRQSP |
| | | SRGLEWLGRTYHRSTWYDDYASSVRGRVSINVDTSKNQYSL |
| | | QLNAVTPEDTGVYYCARVRLQDGNSWSDAFDVWGQGTMVT |
| | | VSSGGGGSQSALTQPASASGSPGQSVTISCTGTSSDVGGYNYV |
| | | SWYQQHPGKAPKLMIYDVSNRPSGVSNRFSGSKSGNTASLTIS |
| | | GLQAEDEADYYCSSYTSSSTLYVFGTGTQLTVL |
| ScFVCAR22 | 848 | gaagtgcagcttcaacaatcaggaccaggactcgtcaaaccatcacagaccctctccctcacatgt |
| in 171, c182 | | gccatctccggggactccatgttgagcaattccgacacttggaattggattagacaaagcccgtcc |
| | | cggggtctggaatggttgggacgcacctaccaccggtctacttggtacgacgactacgcgtcatc |
| | | cgtgcggggaagagtgtccatcaacgtggacacctccaagaaccagtacagcctgcagcttaatg |
| | | ccgtgactcctgaggatacgggcgtctactactgcgcccgcgtccgcctgcaagacgggaacag |
| | | ctggagcgatgcattcgatgtctggggccagggaactatggtcaccgtgtcgtctgggggcggtg |
| | | gatcgggtggcgggggttcggggggcggcggctctcagtccgctcttacccaaccggcctcagc |
| | | ctcggggagccccggccagagcgtgaccatttcctgcaccggcacttcatccgacgtgggcggc |
| | | tacaactacgtgtcctggtaccaacagcacccgggaaaggcccccaagctcatgatctacgacgt |
| | | gtccaacaggccctcgggagtgtccaaccggttctcgggttcgaaatcgggaaacacagccagc |
| | | ctgaccatcagcggactgcaggctgaagatgaagccgactactactgctcctcctacacctcgtca |
| | | tccacgctctacgtgttcggcactggaactcagctgactgtgctg |
| | 753 | EVQLQQSGPGLVKPSQTLSLTCAISGDSMLSNSDTWNWIRQSP |
| | | SRGLEWLGRTYHRSTWYDDYASSVRGRVSINVDTSKNQYSL |
| | | QLNAVTPEDTGVYYCARVRLQDGNSWSDAFDVWGQGTMVT |
| | | VSSGGGGSGGGGSGGGGSQSALTQPASASGSPGQSVTISCTGT |
| | | SSDVGGYNYVSWYQQHPGKAPKLMIYDVSNRPSGVSNRFSG |
| | | SKSGNTASLTISGLQAEDEADYYCSSYTSSSTLYVFGTGTQLT |
| | | VL |
| ScFVCAR22 | 849 | cagtccgctcttacccaaccggcctcagcctcggggagccccggccagagcgtgaccatttcctg |
| in c188 | | caccggcacttcatccgacgtgggcggctacaactacgtgtcctggtaccaacagcacccggga |
| | | aaggcccccaagctcatgatctacgacgtgtccaacaggccctcgggagtgtccaaccggttctc |
| | | gggttcgaaatcgggaaacacagccagcctgaccatcagcggactgcaggctgaagatgaagc |
| | | cgactactactgctcctcctacacctcgtcatccacgctctacgtgttcggcactggaactcagctga |
| | | ctgtgctgggcggaggaggctccgaagtgcagcttcaacaatcaggaccaggactcgtcaaacc |
| | | atcacagaccctctccctcacatgtgccatctccggggactccatgttgagcaattccgacacttgg |
| | | aattggattagacaaagcccgtcccggggtctggaatggttgggacgcacctaccaccggtctact |
| | | tggtacgacgactacgcgtcatccgtgcggggaagagtgtccatcaacgtggacacctccaaga |
| | | accagtacagcctgcagcttaatgccgtgactcctgaggatacgggcgtctactactgcgcccgc |
| | | gtccgcctgcaagacgggaacagctggagcgatgcattcgatgtctggggccagggaactatgg |
| | | tcaccgtgtcgtct |
| | 850 | QSALTQPASASGSPGQSVTISCTGTSSDVGGYNYVSWYQQHP |
| | | GKAPKLMIYDVSNRPSGVSNRFSGSKSGNTASLTISGLQAEDE |
| | | ADYYCSSYTSSSTLYVFGTGTQLTVLGGGGSEVQLQQSGPGL |
| | | VKPSQTLSLTCAISGDSMLSNSDTWNWIRQSPSRGLEWLGRT |
| | | YHRSTWYDDYASSVRGRVSINVDTSKNQYSLQLNAVTPEDTG |
| | | VYYCARVRLQDGNSWSDAFDVWGQGTMVTVSS |
| ScFVCAR22 | 851 | cagtccgctctgactcagccggcctcagcttcggggtcccctggtcaaagcgtcactatttcctgta |
| in c224 | | ccggaacctcatcagacgtgggggctacaattacgtgtcctggtaccaacagcaccccggaaa |
| | | ggctcctaagcttatgatctacgacgtgtccaaccggccgtcaggagtgtccaacagattctccgg |
| | | ctccaagagcggaaacactgccagcttgaccattagcggcttgcaggccgaggacgaagccga |
| | | ctactactgctctagctacacatcctcgtctaccctctacgtgtttggaacggggacccagctgactg |
| | | tgctcgggggtggaggatcagaggtgcaactccagcagtccggtcctggcctcgtgaaaccgtc |
| | | ccaaaccctgtccctgacttgcgccatctcgggcgactccatgctgtccaattccgacacctggaa |
| | | ctggattagacaatcgcctagccggggactcgaatggctgggccggacctaccaccggtccacg |
| | | tggtatgacgactacgcaagctccgtccggggaagggtgtccattaacgtcgatacctccaagaa |
| | | ccagtacagccttcagctgaacgctgtgacccccgaggataccggcgtctactactgtgcaagag |
| | | tgcgattgcaggatggaaactcgtggtcggacgcattcgatgtctggggacagggaactatggtg |
| | | accgtgtcctcg |
| | 850 | QSALTQPASASGSPGQSVTISCTGTSSDVGGYNYVSWYQQHP |
| | | GKAPKLMIYDVSNRPSGVSNRFSGSKSGNTASLTISGLQAEDE |
| | | ADYYCSSYTSSSTLYVFGTGTQLTVLGGGGSEVQLQQSGPGL |
| | | VKPSQTLSLTCAISGDSMLSNSDTWNWIRQSPSRGLEWLGRT |
| | | YHRSTWYDDYASSVRGRVSINVDTSKNQYSLQLNAVTPEDTG |
| | | VYYCARVRLQDGNSWSDAFDVWGQGTMVTVSS |
| ScFVCAR22 | 852 | cagtccgctctgactcagccggcctcagcttcggggtcccctggtcaaagcgtcactatttcctgta |
| in c227 | | ccggaacctcatcagacgtgggcggctacaattacgtgtcctggtaccaacagcaccccggaaa |
| | | ggctcctaagcttatgatctacgacgtgtccaaccggccgtcaggagtgtccaacagattctccgg |
| | | ctccaagagcggaaacactgccagcttgaccattagcggcttgcaggccgaggacgaagccga |
| | | ctactactgctctagctacacatcctcgtctaccctctacgtgtttggaacggggacccagctgactg |
| | | tgctcgggggtggaggatcagaggtgcaactccagcagtccggtcctggcctcgtgaaaccgtc |
| | | ccaaaccctgtccctgacttgcgccatctcgggcgactccatgctgtccaattccgacacctggaa |
| | | ctggattagacaatcgcctagccggggactcgaatggctgggccggacctaccaccggtccacg |
| | | tggtatgacgactacgcaagctccgtccggggaagggtgtccattaacgtcgatacctccaagaa |
| | | ccagtacagccttcagctgaacgctgtgacccccgaggataccggcgtctactactgtgcaagag |
| | | tgcgattgcaggatggaaactcgtggtcggacgcattcgatgtctggggacagggaactatggtc |
| | | actgtgtcctcc |
| | 850 | QSALTQPASASGSPGQSVTISCTGTSSDVGGYNYVSWYQQHP |
| | | GKAPKLMIYDVSNRPSGVSNRFSGSKSGNTASLTISGLQAEDE |
| | | ADYYCSSYTSSSTLYVFGTGTQLTVLGGGGSEVQLQQSGPGL |
| | | VKPSQTLSLTCAISGDSMLSNSDTWNWIRQSPSRGLEWLGRT |
| | | YHRSTWYDDYASSVRGRVSINVDTSKNQYSLQLNAVTPEDTG |
| | | VYYCARVRLQDGNSWSDAFDVWGQGTMVTVSS |

[0578] Table 33 provides nucleotide and amino acid sequences for additional CAR components, e.g., signal peptide, linkers and P2A sites, that can be used in a CAR molecule, e.g., a dual CAR molecule described herein (for example, a dual CAR molecule comprising (i) a first CAR that binds to CD22 and (ii) a second CAR that binds to CD19).

TABLE 33
Additional CAR components

| | SEQ ID | |
|---|---|---|
| Identifier | NO | Sequence |
| Signal peptide for | 853 | atggccctccctgtcaccgccctgctgcttccgctggctcttctgctccacgccgctcggcc |
| CAR22 in c201, | | c |
| c203, and tandem | 2 | MALPVTALLLPLALLLHAARP |
| CARs c171, c182, | | |
| c188 | | |
| Signal peptide | 854 | atggccctgcccgtgactgcgctcctgcttccgttggccctgctcctgcatgccgccagac |
| in tandem CARs | | ct |
| c224, c227 | 2 | MALPVTALLLPLALLLHAARP |
| Signal peptide | 855 | atggccttaccagtgaccgccttgctcctgccgctggccttgctgctccacgccgccaggc |
| CAR19 in c201 and | | cg |
| c203 | 2 | MALPVTALLLPLALLLHAARP |
| Signal peptide | 856 | atggcacttcccgtcaccgccctgctgctcccactcgccctccttctgcacgccgcccgcc |
| CAR22 in c230 | | cc |
| | 2 | MALPVTALLLPLALLLHAARP |
| Signal peptide | 857 | atggccctgccagtgaccgcgctcctgctgcccctggctctgctgcttcacgcggcccgg |
| CAR19 in c230 | | cct |
| | 2 | MALPVTALLLPLALLLHAARP |
| CD8 hinge and | 858 | accactaccccagcaccgaggccacccaccccggctcctaccatcgcctcccagcctctg |
| transmembrane | | tccctgcgtccggaggcatgtagacccgcagctggtggggccgtgcatacccggggtctt |
| CAR22 in c201 and | | gacttcgcctgcgatatctacatttgggcccctctggctggtacttgcggggtcctgctgcttt |
| c203, and in | | cactcgtgatcactctttactgt |
| tandem CARs | 202 | TTTPAPRPPTPAPTIASQPLSLRPEACRPAAGGAVHTRGLD |
| c171, c182, c188, | | FACDIYIWAPLAGTCGVLLLSLVITLYC |
| c224, c227 | | |
| CD8 hinge and | 859 | actaccaccccggccccgcggccccctacaccggcaccgactattgccagccagcctct |
| transmembrane | | ctcgctgcggccggaggcctgccgcccagccgccggcggagccgtgcacacccgcgg |
| CAR22 | | tctggacttcgcgtgcgatatctacatctgggctccgctggccgggacttgtggcgtgctgc |
| In c230 | | tgctgtctctggtcatcacactgtactgc |
| | 202 | TTTPAPRPPTPAPTIASQPLSLRPEACRPAAGGAVHTRGLD |
| | | FACDIYIWAPLAGTCGVLLLSLVITLYC |
| CD8 hinge and | 860 | accacgacgccagcgccgcgaccaccaacaccggcgcccaccatcgcgtcgcagccc |
| transmembrane | | ctgtccctgcgcccagaggcgtgccggccagcggggggggcgcagtgcacacgagg |
| CAR19 in c201 and | | gggctggacttcgcctgtgatatctacatctgggcgcccttggccgggacttgtggggtcct |
| c203 | | tctcctgtcactggttatcaccctttactgc |
| | 202 | TTTPAPRPPTPAPTIASQPLSLRPEACRPAAGGAVHTRGLD |
| | | FACDIYIWAPLAGTCGVLLLSLVITLYC |
| CD8 hinge and | 861 | accaccacccctgcgcctcggcctcctaccccggctcccactatcgcgagccagccgctg |
| transmembrane | | agcctgcggcctgaggcttgccgaccggccgctggcggcgccgtgcatactcggggcct |
| CAR19 | | cgactttgcctgtgacatctacatctgggcccccctggccggaacgtgcggagtgctgctg |
| In c230 | | ctgtcgctggtcattaccctgtattgc |
| | 202 | TTTPAPRPPTPAPTIASQPLSLRPEACRPAAGGAVHTRGLD |
| | | FACDIYIWAPLAGTCGVLLLSLVITLYC |
| 4-1BB | 862 | aagcgcggtcggaagaagctgctgtacatctttaagcaacccttcatgaggcctgtgcaga |
| CAR22 in c201 and | | ctactcaagaggaggacggctgttcatgccggttcccagaggaggaggaaggcggctgc |
| c203, and tandem | | gaactg |
| CARs c171, c182, | 14 | KRGRKKLLYIFKQPFMRPVQTTQEEDGCSCRFPEEEEGGC |
| c188, c224, c227 | | EL |
| 4-1BB | 15 | aaacggggcagaaagaaactcctgtatatattcaaacaaccatttatgagaccagtacaaa |
| CAR19 in c201 and | | ctactcaagaggaagatggctgtagctgccgatttccagaagaagaagaaggaggatgtg |
| c203 | | aactg |
| | 14 | KRGRKKLLYIFKQPFMRPVQTTQEEDGCSCRFPEEEEGGC |
| | | EL |
| 4-1BB | 863 | aagcgcggaagaaagaagctgctctacatcttcaagcaacccttcatgcggcctgtgcag |
| CAR22 in c230 | | accacccaggaagaggatggctgctcctgccggttcccggaggaagaagagggcggat |
| | | gcgaactg |
| | 14 | KRGRKKLLYIFKQPFMRPVQTTQEEDGCSCRFPEEEEGGC |
| | | EL |
| 4-1BB | 864 | aaacgcggaaggaagaagctgttgtacattttcaagcagcccttcatgcgcccggtgcaaa |
| CAR19 in c230 | | ctactcaggaggaagatggctgttcctgtcggttccccgaagaggaagaaggcggctgc |
| | | gagttg |
| | 14 | KRGRKKLLYIFKQPFMRPVQTTQEEDGCSCRFPEEEEGGC |
| | | EL |
| CD3zeta | 865 | cgcgtgaaattcagccgcagcgcagatgctccagcctaccagcaggggcagaaccagct |
| CAR22 in c201 and | | ctacaacgaactcaatcttggtcggagagaggagtacgacgtgctggacaagcggagag |
| c203, and tandem | | gacgggacccagaaatgggcgggaagccgcgcagaaagaatccccaagagggcctgt |
| CARs 171, c182, | | acaacgagctccaaaaggataagatggcagaagcctatagcgagattggtatgaaaggg |
| c188, c224, c227 | | gaacgcagaagaggcaaaggccacgacggactgtaccagggactcagcaccgccacc |
| | | aaggacacctatgacgctcttcacatgcaggccctgccgcctcgg |
| | 20 | RVKFSRSADAPAYQQGQNQLYNELNLGRREEYDVLDKR |
| | | RGRDPEMGGKPRRKNPQEGLYNELQKDKMAEAYSEIGM |
| | | KGERRRGKGHDGLYQGLSTATKDTYDALHMQALPPR |
| CD3zeta | 21 | agagtgaagttcagcaggagcgcagacgcccccgcgtaccagcagggccagaaccag |
| CAR19 in c201 and | | ctctataacgagctcaatctaggacgaagagaggagtacgatgttttggacaagagacgtg |
| c203 | | gccgggaccctgagatggggggaaagccgagaaggaagaaccctcaggaaggcctgt |
| | | acaatgaactgcagaaagataagatggcggaggcctacagtgagattgggatgaaaggc |
| | | gagcgccggaggggcaaggggcacgatggcctttaccagggtctcagtacagccacca |
| | | aggacacctacgacgcccttcacatgcaggccctgccccctcgc |
| | 20 | RVKFSRSADAPAYQQGQNQLYNELNLGRREEYDVLDKR |
| | | RGRDPEMGGKPRRKNPQEGLYNELQKDKMAEAYSEIGM |
| | | KGERRRGKGHDGLYQGLSTATKDTYDALHMQALPPR |
| CD3zeta | 866 | cgcgtgaagttcagccgaagcgccgacgccccggcctaccagcagggccagaaccaa |
| CAR22 in c230 | | ctgtacaacgaactcaacctgggtcggagagaagagtacgacgtgctggacaaaagacg |
| | | cggcagggaccccgagatgggcggaaagcctcgccgcaagaacccgcaggagggcc |
| | | tctacaacgagctgcagaaggacaagatggccgaagcctactcagagatcggcatgaag |
| | | ggggagcggaggcgcgggaagggccacgacggtttgtaccaaggactttccactgcga |
| | | ccaaggacacctacgatgccctccatatgcaagccctgccgccccgg |
| | 20 | RVKFSRSADAPAYQQGQNQLYNELNLGRREEYDVLDKR |
| | | RGRDPEMGGKPRRKNPQEGLYNELQKDKMAEAYSEIGM |
| | | KGERRRGKGHDGLYQGLSTATKDTYDALHMQALPPR |
| CD3zeta | 867 | agggtcaagttctcccggtccgccgatgctcccgcctaccaacaggggcagaaccagctt |
| CAR19 in c230 | | tataacgaactgaacctgggcaggagggaggaatatgatgtgttggataagcgccgggg |
| | | ccgggacccagaaatggggggaaagcccagaagaaagaaccctcaagagggactttac |
| | | aacgaattgcagaaagacaaaatggccgaggcctactccgagattgggatgaagggcga |
| | | aagacggagaggaaaggggcacgacgggctctaccagggactcagcaccgccaccaa |
| | | agatacctacgacgccctgcatatgcaggcgctgccgccgcgc |
| | 20 | RVKFSRSADAPAYQQGQNQLYNELNLGRREEYDVLDKR |
| | | RGRDPEMGGKPRRKNPQEGLYNELQKDKMAEAYSEIGM |
| | | KGERRRGKGHDGLYQGLSTATKDTYDALHMQALPPR |
| Linker between | 868 | ttggcagaagccgccgcgaaa |
| scFVs in c171 | 869 | LAEAAAK |
| Linker between | 870 | ggtggaggtggcagcggaggaggtgggtccggcggtggaggaagc |
| scFVs in | 104 | GGGGSGGGGSGGGGS |
| c182, c188 | | |
| Linker between | 871 | ggcggaggcgggagcggaggaggaggctctggcggaggaggaagc |
| scFVs in c224 | 104 | GGGGSGGGGSGGGGS |
| Linker between | 872 | ggcggtggaggctcgggggggggcggctcaggaggaggcggctca |
| scFVs in c227 | 104 | GGGGSGGGGSGGGGS |
| P2A in c201, c203 | 873 | ggaagcggagctactaacttcagcctgctgaagcaggctggagacgtggaggagaacc |
| | | ctggacct |
| | 874 | GSGATNFSLLKQAGDVEENPGP |
| P2A in c230 | 875 | ggttccggagctaccaacttctcgctgttgaagcaggccggagatgtcgaggaaaacccg |
| | | ggacct |
| | 874 | GSGATNFSLLKQAGDVEENPGP |
| Gly4Ser linker | 876 | Ggtggaggtggcagc |
| | 877 | GGGGS |

[0579] In some embodiments, the CAR-expressing immune effector cell described herein can further comprise a second CAR, e.g., a second CAR that includes a different antigen binding domain, e.g., to the same target (e.g., a target described above) or a different target. In some embodiments, the second CAR includes an antigen binding domain to a target expressed on the same cancer cell type as the target of the first CAR. In some embodiments, the CAR-expressing immune effector cell comprises a first CAR that targets a first antigen and includes an intracellular signaling domain having a costimulatory signaling domain but not a primary signaling domain, and a second CAR that targets a second, different, antigen and includes an intracellular signaling domain having a primary signaling domain but not a costimulatory signaling domain. While not wishing to be bound by theory, placement of a costimulatory signaling domain, e.g., 4-1BB, CD28, CD27, or OX-40, onto the first CAR, and the primary signaling domain, e.g., CD3 zeta, on the second CAR can limit the CAR activity to cells where both targets are expressed. In some embodiments, the CAR expressing immune effector cell comprises a first CAR that includes an antigen binding domain that targets, e.g., a target described above, a transmembrane domain and a costimulatory domain and a second CAR that targets an antigen other than antigen targeted by the first CAR (e.g., an antigen expressed on the same cancer cell type as the first target) and includes an antigen binding domain, a transmembrane domain and a primary signaling domain. In another embodiment, the CAR expressing immune effector cell comprises a first CAR that includes an antigen binding domain that targets, e.g., a target described above, a transmembrane domain and a primary signaling domain and a second CAR that targets an antigen other than antigen targeted by the first CAR (e.g., an antigen expressed on the same cancer cell type as the first target) and includes an antigen binding domain to the antigen, a transmembrane domain and a costimulatory signaling domain.

[0580] In some embodiments, the CAR-expressing immune effector cell comprises a CAR described herein, e.g., a CAR to a target described above, and an inhibitory CAR. In some embodiments, the inhibitory CAR comprises an antigen binding domain that binds an antigen found on normal cells but not cancer cells, e.g., normal cells that also express the target. In some embodiments, the inhibitory CAR comprises the antigen binding domain, a transmembrane domain and an intracellular domain of an inhibitory molecule. For example, the intracellular domain of the inhibitory CAR can be an intracellular domain of PD1, PD-L1, CTLA-4, TIM-3, CEACAM (e.g., CEACAM-1, CEACAM-3 and/or CEACAM-5), LAG-3, VISTA, BTLA, TIGIT, LAIR1, CD160, 2B4, or TGFR beta.

[0581] In some embodiments, an immune effector cell (e.g., T cell, NK cell) comprises a first CAR comprising an antigen binding domain that binds to a tumor antigen as described herein, and a second CAR comprising a PD1 extracellular domain or a fragment thereof.

[0582] In some embodiments, the cell further comprises an inhibitory molecule as described above.

[0583] In some embodiments, the second CAR in the cell is an inhibitory CAR, wherein the inhibitory CAR comprises an antigen binding domain, a transmembrane domain, and an intracellular domain of an inhibitory molecule. The inhibitory molecule can be chosen from one or more of: PD1, PD-L1, CTLA-4, TIM-3, LAG-3, VISTA, BTLA, TIGIT, LAIR1, CD160, 2B4, TGFR beta, CEACAM-1, CEACAM-3, and CEACAM-5. In some embodiments, the second CAR molecule comprises the extracellular domain of PD1 or a fragment thereof.

[0584] In embodiments, the second CAR molecule in the cell further comprises an intracellular signaling domain comprising a primary signaling domain and/or an intracellular signaling domain.

[0585] In other embodiments, the intracellular signaling domain in the cell comprises a primary signaling domain comprising the functional domain of CD3 zeta and a costimulatory signaling domain comprising the functional domain of 4-1BB.

[0586] In some embodiments, the antigen binding domain of the first CAR molecule comprises a scFv and the antigen binding domain of the second CAR molecule does not comprise a scFv. For example, the antigen binding domain of the first CAR molecule comprises a scFv and the antigen binding domain of the second CAR molecule comprises a camelid VHH domain.

### Conformation of CARs

[0587] In the embodiments contemplated herein, it is appreciated that the conformation of one or more CARs could be modulated by the vectors described herein above. Accordingly, these conformations are described below in relation to the CAR-expressing cell.

### Split CAR

[0588] In some embodiments, the CAR-expressing cell uses a split CAR. The split CAR approach is described in more detail in publications WO2014/055442 and WO2014/055657. Briefly, a split CAR system comprises a cell expressing a first CAR having a first antigen binding domain and a costimulatory domain (e.g., 41BB), and the cell also expresses a second CAR having a second antigen binding domain and an intracellular signaling domain (e.g., CD3 zeta). When the cell encounters the first antigen, the costimulatory domain is activated, and the cell proliferates. When the cell encounters the second antigen, the intracellular signaling domain is activated and cell-killing activity begins. Thus, the CAR-expressing cell is only fully activated in the presence of both antigens.

### Multiple CAR

[0589] In some aspects, the CAR-expressing cell described herein can further comprise a second CAR, e.g., a second CAR that includes a different antigen binding domain, e.g., to the same target or a different target (e.g., a target other than a cancer associated antigen described herein or a different cancer associated antigen described herein). In some embodiments, the second CAR includes an antigen binding domain to a target expressed the same cancer cell type as the cancer associated antigen. In some embodiments, the CAR-expressing cell comprises a first CAR that targets a first antigen and includes an intracellular signaling domain having a costimulatory signaling domain but not a primary signaling domain, and a second CAR that targets a second, different, antigen and includes an intracellular signaling domain having a primary signaling domain but not a costimulatory signaling domain. While not wishing to be bound by theory, placement of a costimulatory signaling domain, e.g., 4-1BB, CD28, CD27 or OX-40, onto the first CAR, and the primary signaling domain, e.g., CD3 zeta, on the second CAR can limit the CAR activity to cells where both targets are expressed. In some embodiments, the CAR expressing cell comprises a first cancer associated antigen CAR that includes an antigen binding domain that binds a target antigen described herein, a transmembrane domain and a costimulatory domain and a second CAR that targets a different target antigen (e.g., an antigen expressed on that same cancer cell type as the first target antigen) and includes an antigen binding domain, a transmembrane domain and a primary signaling domain. In another embodiment, the CAR expressing cell comprises a first CAR that includes an antigen binding domain that binds a target antigen described herein, a transmembrane domain and a primary signaling domain and a second CAR that targets an antigen other than the first target antigen (e.g., an antigen expressed on the same cancer cell type as the first target antigen) and includes an antigen binding domain to the antigen, a transmembrane domain and a costimulatory signaling domain.

[0590] In some embodiments, the disclosure provides a first and second CAR, wherein the antigen binding domain of one of said first CAR said second CAR does not comprise a variable light domain and a variable heavy domain. In some embodiments, the antigen binding domain of one of said first CAR said second CAR is an scFv, and the other is not an scFv. In some embodiments, the antigen binding domain of one of said first CAR said second CAR comprises a single VH domain, e.g., a camelid, shark, or lamprey single VH domain, or a single VH domain derived from a human or mouse sequence. In some embodiments, the antigen binding domain of one of said first CAR said second CAR comprises a nanobody. In some embodiments, the antigen binding domain of one of said first CAR said second CAR comprises a camelid VHH domain.

[0591] Once the methods described herein are performed, various assays can be used to evaluate the activity of, for e.g., the ability to expand T cells following antigen stimulation, sustain T cell expansion in the absence of re-stimulation, and anti-cancer activities in appropriate in vitro and animal models. Assays to evaluate the effects of a CAR of the present invention are known to those of skill in the art and generally described below.

[0592] Western blot analysis of CAR expression in primary T cells can be used to detect the presence of monomers and dimers. See, e.g., Milone et al., Molecular Therapy 17(8): 1453-1464 (2009). Very briefly, T cells (1:1 mixture of CD4⁺ and CD8⁺ T cells) expressing the CARs are expanded in vitro for more than 10 days followed by lysis and SDS-PAGE under reducing conditions. CARs containing the full length TCR-ζ cytoplasmic domain and the endogenous TCR-ζ chain are detected by western blotting using an antibody to the TCR-ζ chain. The same T cell subsets are used for SDS-PAGE analysis under non-reducing conditions to permit evaluation of covalent dimer formation.

[0593] In vitro expansion of CAR⁺ T cells following antigen stimulation can be measured by flow cytometry.

[0594] Sustained CAR⁺ T cell expansion in the absence of re-stimulation can also be measured. See, e.g., Milone et al., Molecular Therapy 17(8): 1453-1464 (2009). Briefly, mean T cell volume (fl) is measured on day 8 of culture using a Coulter Multisizer III particle counter, a Nexcelom Cellometer Vision or Millipore Scepter, following stimulation with αCD3/αCD28 coated magnetic beads on day 0, and transduction with the indicated CAR on day 1.

[0595] Animal models can also be used to measure a CART activity. For example, xenograft model using human a cancer associated antigen described herein-specific CAR⁺ T cells to treat a primary human pre-B ALL in immunodeficient mice can be used. See, e.g., Milone et al., Molecular Therapy 17(8): 1453-1464 (2009).

[0596] Dose dependent CAR treatment response can be evaluated. See, e.g., Milone et al., Molecular Therapy 17(8): 1453-1464 (2009). For example, peripheral blood is obtained 35-70 days after establishing leukemia in mice injected on day 21 with CAR T cells, an equivalent number of mock-transduced T cells, or no T cells. Mice from each group are randomly bled for determination of peripheral blood a cancer associate antigen as described herein⁺ ALL blast counts and then killed on days 35 and 49. The remaining animals are evaluated on days 57 and 70.

[0597] Assessment of cell proliferation and cytokine production has been previously described, e.g., at Milone et al., Molecular Therapy 17(8): 1453-1464 (2009).

[0598] Cytotoxicity can be assessed by a standard 51Cr-release assay. See, e.g., Milone et al., Molecular Therapy 17(8): 1453-1464 (2009

[0599] Imaging technologies can be used to evaluate specific trafficking and proliferation of CARs in tumor-bearing animal models. Such assays have been described, for example, in Barrett et al., Human Gene Therapy 22:1575-1586 (2011).

[0600] Other assays, including those described herein as well as those that are known in the art can also be used to evaluate the CARs described herein.

[0601] The following examples are provided to further illustrate some embodiments of the present disclosure, but are not intended to limit the scope of the disclosure; it will be understood by their exemplary nature that other procedures, methodologies, or techniques known to those skilled in the art may alternatively be used.

### EXAMPLES

[0602] The following examples are put forth so as to provide those of ordinary skill in the art with a description of how the compositions and methods described herein may be used, made, and evaluated, and are intended to be purely exemplary of the disclosure and are not intended to limit the scope of the current disclosure.

### Example 1: Expi293F Cells as Supportive LV Production System

[0603] Most current LV vector production methods involve HEK293T cells, which comprise SV40 T-antigen. In the field, the presence of the SV40 T-antigen in the producer cells is generally thought to be beneficial for vector production. In addition, HEK293T cells show increased cell growth and transfection efficiency in comparison to HEK293 cells that lack SV40 T-antigen. This experiment evaluates the Expi293F cells, a cell line lacking SV40 T-antigen, as supportive LV production system to minimize safety concerns. As shown in this Example, cells lacking the large T-antigen are shown to give satisfactory yield and purity of lentiviral vectors. The cells tested herein are also beneficial because they reduce the potential for recombination events that might result in replication competent lentiviruses (RCLs), thereby reducing the risk of viral replication and insertion into the host DNA at an undesired locus. Commercial Expi293F™ cells (ThermoFisher—Catalog #A14527—Lot #1994635) were obtained. Lentiviral productivity of Expi293F cell lines were compared against the productivity of lentiviral vectors in HEK293T cell line. Both Expi293F™ cells and HEK293T suspension cells were seeded at a concentration of 0.15E6 cells/mL in FreeStyle™ Medium in a SF 250 mL flask and was and cultured for 3 days at 150 rpm. After three days of cell growth and amplification, the cells were transfected with model GOI plasmid encoding a humanized CD19 CAR (C1). 0.4 μg DNA/E6 cells were mixed with PEIpro® (0.4 μL/1E6 cells) and were allowed to form a transfection complex. The transfection complex was directly added to the cell culture. 24 hours post transfection, sodium butyrate and 25 U/mL benzonase with MgCl₂ (2 mM final concentration) were added to the culture media. Cells were harvested 48 hours post-infection for analytical purpose. Lentiviral productivity for each cell line was determined and compared using a TU assay and ELISA.

[0604] Analytical methods: The samples were analyzed by two different methods, TU assay and p24 ELISA, in order to provide a functional titer (measurement of the total of virions capable of integrating into cells) and to assess the quality of production through the ratio PP/IP (physical particles/infectious particles), an important parameter relating to reducing cytotoxicity and increasing the efficiency of cell transduction. This ratio indicated the percentage of viral particles that were infectious as compared to the overall viral particles (physical titer).

[0605] Functional titer: TU assay: The Transduction Units assay was based on transduction of HEK293-T cells followed by extraction of genomic DNA and quantification of the viral copies by amplifying a vector specific sequence—lentiviral WPRE element—and a house-keeping gene—albumin sequence known to be present in two copies per human cell—in a duplex qPCR. After normalization and correlation to the number of cells seeded, the concentration of transducing units, i.e., infectious viral particles that were able to deliver their genome into a target cell followed by integration in the host cell genome, was calculated.

[0606] p24 enzyme-linked immunosorbent assay (Elisa): This method provided an approximation of effective LVV concentration by detecting all the physical particles, whether functional or not (i.e., immature forms, empty particles) as well as free p24 proteins in the supernatant. The physical titer (Lentivirus Particle (LP)/mL) was quantified by a p24 Elisa measuring the lentiviral capsid protein p24. The p24 core antigen was detected directly in the lentiviral supernatant with a HIV-1 p24 ELISA kit. This Elisa measured the concentration of p24 (pg/mL) which was proportional to the amount of lentiviral particles (LP/mL).

[0607] This experiment showed that HEK293T/17 cells show a LV productivity of ˜3.9E7 TU/mL. Expi293F cells generate a satisfactory LV productivity (˜1.5E7 TU/mL) (FIG. 1A). A higher ratio PP/IP is observed (˜1882) which might highlight a reduced assembly efficiency of Expi293F cells. The cell densities observed at each passage were comparable between both cell lines (˜3×10⁶ cells/mL) (FIG. 1B). The population doubling time for the two cell lines were found to be slightly different: around 19 h for HEK293T/17 cells and 21 h for Expi293F (FIG. 1B). Both cell lines showed >90% viability in culture (FIG. 1C). Further development was launched to optimize Expi293F performance.

### Example 2: Evaluation of the Effects of Various Transfection Reagents in Increasing Lentiviral Productivity

[0608] Expi293F™ cells were seeded in one SF 250 mL flask to reach a final density superior to 0.15E6 cells/mL. Cells were seeded at a concentration of 0.15E6 cells/mL in FreeStyle™ Medium in a SF 250 mL flask and was cultured for 3 days at 150 rpm. After three days of cell growth and amplification, the cells were transfected with 3 different model CAR constructs (comprising a humanized CD19 CAR (C1), a CD19-CD22 CAR dual Car (I1), or comprising a humanized CAR and a Tet2 shRNA (M1). PEIpro® or FectoVIR®-AAV was used as transfection reagent. 0.4 μg DNA of each construct/E6 cells were mixed with either PEIpro® (0.4 μL/1E6 cells) or FectoVIR®-AAV (0.4 μL/1E6 cells) and were allowed to form a transfection complex. The transfection complexes were added to the cell culture directly. 24 hours post transfection, 25 U/mL benzonase with MgCl₂ (2 mM final concentration) were added to each culture media. Cells were harvested 48 hours post-infection for analytical purpose. Lentiviral productivity for each cell line was determined using TU assay and Elisa and compared. The transfection reagent FectoVIR®-AAV increased the LV productivity of Expi293F cells significantly, from 1.9 fold to 2.8 fold depending on the gene of interest compared to PEIpro® reagent (FIG. 2A). The gain of productivity was retained in large-scale production (FIG. 2B and Table 1).

TABLE 1
Raw data of lentiviral productivity in bulk harvest

| | Transfection | TU titer | Ratio |
|---|---|---|---|
| GOI | Reagent | (TU/mL) | PP/IP |
| M1 | FectoVIR ®-AAV | 1.20E+07 | 1188 |
| | PEIpro ® | 6.38E+06 | 1955 |
| C1 | FectoVIR ®-AAV | 2.97E+07 | 953 |
| | PEIpro ® | 1.05E+07 | 1157 |
| I1 | FectoVIR ®-AAV | 1.18E+07 | 1800 |
| | PEIpro ® | 6.29E+06 | 1583 |

Furthermore, a reduced ratio PP/IP was observed with when constructs were transfected with FectoVIR ®-AAV highlighting a better transfection efficiency.

### Example 3: Determination of Suitable DNA Quantity for Higher Viral Production

[0609] This example describes determining the amount of DNA used for transfection to increase viral yield.

[0610] Expi293F™ cells were thawed and seeded in one SF 250 mL flask to reach a final density superior to 0.15E6 cells/mL. Cells were seeded at a concentration of 0.15E6 cells/mL in FreeStyle™ 293 Expression Medium in a SF 250 mL flask and cultured for 3 days at 150 rpm. Cells were cultured routinely to reach a suitable amount for the seeding of a 50 L culture. Expi293F cells were inoculated in the single use stirred tank bioreactor in FreeStyle™ culture medium, and a suitable cell density was reached (1.50×10⁶ cells/mL-2.50×10⁶ cells/mL). The viability of the cells was assessed to be ≥90%. Transfection was performed 72 hours after seeding. 0.3 μg DNA/E6 cells, 0.4 μg DNA/E6 cells, 0.5 μg DNA/E6, or 0.6 μg DNA/E6 cells were mixed with FectoVIR-AAV® in 1:1 ratio in Opti-MEM™ I Reduced Serum Medium (5% wv) and was incubated for 30 minutes to allow for formation of a transfection complex. The transfection complexes were directly added to the cell culture. 20 hours post transfection, 25 U/mL benzonase with MgCl₂ (2 mM final concentration) were added to the culture media. Conditioned media containing the lentiviral vector particles were harvested 48 hours after transfection.

[0611] The data showed that the highest viral production was obtained with 0.4 μg DNA/1E6 cells (FIG. 3). Furthermore, viral production obtained with 0.4 μg DNA/1E6 cells was higher than the viral production obtained with 1p g DNA/1E6 cells recommended by the provider (data not shown).

### Example 4: Determination of Modification of Culture Media pH Before Transfection on Lentiviral Productivity

[0612] This example demonstrates that lowering the pH of the culture media from 7.1 to 6.7±0.05 increases lentiviral productivity.

[0613] Expi293F™ cells were thawed and seeded in one SF250 mL to reach a final density superior to 0.15E6 cells/mL. Cells were cultured for four days under standard culture conditions and scaled up to reach a suitable amount for the seeding of a 2.5 L culture. FreeStyle™ Medium, a chemically defined, serum-free and protein-free medium was used as a culture medium.

[0614] After three days of cell growth and amplification, a suitable cell density at transfection defined during the development was reached (1.50×10⁶ cells/mL-2.50×10⁶ cells/mL). The viability of the cells was assessed to be ≥90%. Transfection was performed 72 hours after seeding. After three days of cell growth and amplification, the cells were transfected with 3 model constructs (C1, I1, and M1). Before transfection, the pH setpoint was modified from 7.1 to 6.7±0.05. The transfection was performed after reaching this new setpoint. The cells were transfected with transfection complexes obtained by mixing and incubating 0.4 μg DNA of each construct/E6 cells with FectoVIR®-AAV reagent (0.4 μL/1E6 cells). 24 hours post transfection, 25 U/mL benzonase with MgCl₂ (2 mM final concentration) were added to each culture media. Cells were harvested 48 hours post-infection for analytical purpose. Lentiviral productivity for each cell line was determined using TU assay and Elisa and compared.

[0615] The data showed lentiviral productivity increased about 3-fold for both constructs when the pH was shifted to 6.7 before transfection (FIG. 4). In contrast another study showed that lowering the pH to 6.7 earlier in the process (at inoculation) negatively impacted the cell growth and slowed down the production process (data not shown). Thus, this experiment shows that a carefully timed lowering of the pH yields both high cell growth and higher LV productivity.

### Example 5: Lentivirus Production

[0616] All vector production and cell culture were done using Expi293F™ human embryonic kidney (HEK) cells are derived from the 293F cell line and also using HEK293T cells.

[0617] One vial of the Expi293F™ cells was thawed and seeded in one SF250 mL flask to reach a final density superior to 0.15E6 cells/mL. Cells were cultured for four days under standard culture conditions using FreeStyle™ medium and scaled up to reach the needed cells amount for the seeding of the stirred tank bioreactor 50 L.

[0618] Expi293F cells were inoculated in the single use stirred tank bioreactor at 0.2×10⁶ cells/mL+0.025 in FreeStyle™ medium in a final volume of 47 L. After three days of cell growth and amplification, a suitable cell density at transfection defined during the development was reached (1.50×10⁶ cells/mL-2.50×10⁶ cells/mL). The viability of the cells was assessed to be ≥90%. Transfection was performed 72 hours after seeding. Before transfection, the pH setpoint was modified from 7.1 to 6.7±0.05. The transfection was performed after reaching this new setpoint.

[0619] Transient transfection of Expi293F cells was achieved with four different plasmids consisting of three helper plasmids and one transfer (GOI) plasmid:
[0620] (i) a plasmid encoding for the glycoprotein of the vesicular stomatitis virus (VSV-g) envelope,
[0621] (ii) a plasmid encoding for the structural proteins and viral enzymes,
[0622] (iii) a plasmid encoding a post-transcriptional regulator (Rev), and
[0623] (iv) the transfer plasmid containing the transgene and the minimal cis-acting sequences that are required for viral RNA production, processing and packaging.

[0624] FectoVIR®-AAV (Ref 120-100, Polyplus) was used as a transfection reagent. 0.4 μg DNA/E6 cells were mixed with FectorVIR-AAV® (0.4 μL/1E6 cells) in Opti-MEM™ I Reduced Serum Medium (5% wv) and incubated for 30 minutes to allow for formation of a transfection complex. The transfection complex was directly added to the cell culture. 20 hours post transfection, 25 U/mL benzonase with MgCl₂ (2 mM final concentration) were added to the culture media. Conditioned media containing the lentiviral vector particles were harvested 48 hours after transfection. TU assay and p24 ELISA were performed as described in Example 1.

[0625] The data showed, application of conditions as described in Examples 2 to 4 increased the lentiviral productivity in Expi293F cells to 3E7 TU/mL for C1 compared to ˜1.5E7 TU/mL obtained in control conditions according to Example 1. The lentiviral productivity was found to be 1.5E7 TU/mL in bulk harvest for I1. FIG. 5 shows the comparative lentiviral productivity using C1 and I1 construct in two production systems: (i) Expi293F cells using FectoVIR®-AAV as a transfection reagent and (ii) HEK293T cells using PEIpro® as a transfection reagent.

### Example 6: Addition of Arginine Improves Filtration Process Time in Various Experimental Setup

[0626] Filtration was performed using C1 as a model vector to obtain the clarified harvest. To test the effect of arginine as a stabilizing agent, the starting material containing lentiviral vector was spiked with 1 M arginine-HCl to achieve a final arginine concentration of 50 mM. The clarified harvest was used as untreated control.

[0627] Clarified harvest samples were subjected to filtration using PIPES formulation buffer (20 mM PIPES 75 mM NaCl 73 mM Sucrose pH 6.5), to concentrate and re-buffer the lentiviral vector solution. The concentrated and re-buffered lentiviral vector solution was recovered from the filtration skid and the system were flushed hold-up volumes of PIPES filtration buffer.

[0628] Determination of transducing unit (TU) titer on HEK-293T cells in the first filtrate was performed according to the bioanalytical test method described in Example 1. Determination of p24 by enzyme-linked immunosorbent assay (ELISA) was performed as described in Example 1. The data showed in presence of arginine, the process time was reduced from 244 min to 145 min compared to the control run when samples were subjected to ultrafiltration (FIG. 6). In conclusion, the addition of arginine (50 mM final concentration) improved the process time by about 40%.

### Example 7: Presence of Arginine Improved Vector Recovery During Filtration

[0629] This experiment describes the impact of the addition of arginine on the vector recovery of the subsequent filtration steps.

[0630] Clarified harvest was prepared and was spiked with 50 mM arginine. Untreated clarified harvest was used as control. For both samples 200 mL clarified harvest were used. The vector concentration in the clarified harvest containing arginine was 4.8E+06 TU/mL, whereas the starting concentration in the control clarified harvest sample was 9.5E+06 TU/mL. The clarified harvest was filtrated and concentrated according to viral purification procedures known to a person skilled in the arts.

[0631] The sample containing arginine had an end volume of 22.3 mL and a vector concentration of 3.7E+07 TU/mL resulting in a vector recovery of 85%, whereas the control sample without arginine had an end volume of 20.5 mL and a vector concentration of 3.7E+07 TU/mL resulting in a vector recovery of only 40% (FIG. 7).

### Examples 8: Further Purification of Clarified Harvest after Subjecting the Samples to Filtration Trials

[0632] This experiment described further purification procedure of the clarified harvest. Clarified harvest was spiked with 1 M arginine-HCl to achieve a final arginine concentration of 50 mM. The samples were subjected to filtration using as described in Example 6 to obtain first purification intermediate. Benzonase treatment using 50 U/mL was performed on the samples. Chromatography was performed using PIPES exchange buffer to equilibrate and wash the column.

[0633] The purification intermediate (first filtrate) obtained after chromatography was spiked with 1 M arginine-HCl to a final concentration of 75 mM arginine and subjected to filtration using PIPES formulation buffer. The second filtrate was collected for further analysis.

### Example 9: Robust High Vector Recoveries can be Achieved for Both Filtration Steps in the Lentiviral Downstream Process in the Presence of Arginine

[0634] This experiment described the vector recovery increased further when arginine spike was implemented prior to filtration steps.

[0635] This downstream process was used for the purification of M1 constructs and RCV construct, which were produced using an Expi293F cell-line. Using different vector constructs of product M1, the addition of 75 mM arginine prior to filtrate 1 and filtrate 2 was tested for a range of vector concentrations and also on multiple constructs.

[0636] For filtrate 1, an average starting volume of 3168 mL (range: 3031-3224 mL) with an average TU titer of 7.5E+06 TU/mL (range: 4.3E+06-1.2E+07 TU/mL) was used. After concentration and filtration, the recovered filtrate 1 retentate had an average volume of 564 mL (range: 526-611 mL) and TU titer of 3.6E+07 TU/mL (range: 1.9E+07-5.7E+07 TU/mL). Accordingly, the overall concentration factor was about 5.6 and vector recovery in terms of transducing units was on average 85% (FIG. 8).

[0637] For filtrate 2, an average starting volume of 559 mL (range: 522-592 mL) with an average TU titer of 2.6E+07 TU/mL (range: 1.5E+07-4.1E+07 TU/mL) was used. After concentration and filtration, the recovered filtrate 2 retentate had an average volume of 46.3 mL (range: 24.3-74.4 ML) and TU titer of 3.4E+08 TU/mL (range: 1.3E+08-1.0E+09 TU/mL). Accordingly, the overall concentration factor was about 13.5 (range: 7.5-22.6) and vector recovery in terms of transducing units was on average 87% (FIG. 8).

### Example 10: Arginine Reduces the Presence of Aggregates in a Concentration Dependent Manner

[0638] The example describes the impact of arginine on the presence of aggregates.

[0639] Filtrate 2 samples were taken after completion of purification according to Example 8 and were treated as follows: (1) One sample was mixed with 0.825 M arginine to achieve a final arginine concentration of 150 mM. (2) Another sample was mixed with an equal amount 2.475 mM arginine to achieve a final concentration of 300 mM. (3) A control sample was treated with an equal amount of PIPES formulation buffer to keep the final arginine concentration at 75 mM (similar to filtrate 2 filtrate obtained in Example 9) and to account for the dilution caused by the addition of arginine to the other two samples. The samples were analyzed for sub visible particles by micro-flow imaging (MFI).

[0640] Presence of arginine was found to reduce the particle count and size in a concentration dependent manner (FIG. 9). The addition of arginine seemed to provide the lentiviral particles a resistance to aggregation. In conclusion, arginine was found to be a suitable stabilizing agent for the purification of lentiviral vectors to improve lentiviral vector yields in purification processes.

### Example 11: Presence of Benzonase Decreased DNA Impurities

[0641] This example describes the impact of benzonase on DNA impurities.

[0642] The lentivirus production was performed as described in Example 5 at 250 mL SF, except for a) a change in the time of benzonase addition; and/or b) a change in the amount of benzonase. In Example 5, benzonase was added at a concentration of 24 U/mL at 24 HPT. With a first batch of LVV (C1), the experiment included varying the addition of benzonase at 5 U/mL, 15 U/mL, 25 U/mL, and 50 U/mL at both 3 HPT and 24 HPT, as seen in Table 12a).

TABLE 12a
Benzonase Addition (bold: control condition)

| Concentration | Process Time |
|---|---|
| / | / |

| | | |
|---|---|---|
| 5 | U/mL | 3 HPT |
| 15 | U/mL | |
| 25 | U/mL | |
| 50 | U/mL | |
| 5 | U/mL | 24 HPT |
| 15 | U/mL | |
| 25 | U/mL | |
| 50 | U/mL | |

[0643] As seen in FIG. 10, there was no impact of benzonase on productivity of infections LVV (TU/mL—TU Assay), showing between 2.9E+7-4.3E+7 TU/mL at harvest, or the ratio of PP/IP (Physical Particles/Infectious Particles) at harvest with varying concentrations of benzonase and different times of addition. However, there was a significant decrease in the total DNA quantity after the addition of benzonase after transfection (FIG. 11). These results were further confirmed with a second batch of LVV production (C1), additionally adding benzonase at 6 HPT (Table 12b; FIG. 12).

TABLE 12b
Benzonase Addition (bold: control condition)

| | |
|---|---|
| Concentration | Process Time |

| | | | |
|---|---|---|---|
| 25 | U/mL | 48 | HPT |
| 5 | U/mL | 3 | HPT |
| 15 | U/mL | | |
| 25 | U/mL | | |
| 50 | U/mL | | |
| 5 | U/mL | 6 | HPT |
| 15 | U/mL | | |
| 25 | U/mL | | |
| 50 | U/mL | | |
| 5 | U/mL | 24 | HPT |
| 15 | U/mL | | |
| 25 | U/mL | | |
| 50 | U/mL | | |

[0644] These data show that the addition of benzonase at varying concentrations and time does not affect the productivity of infectious LVV but significantly decreased the concentration of DNA impurities that may affect production.

### Example 12: Incubation Time and Volume of Complexation

[0645] This example describes the impact of incubation time and volume of complexation.

[0646] The lentivirus production was performed as described in Example 5 at 250 mL SF, except for a) a change in the time of incubation; and/or b) a change in the volume of complexation. In Example 5, FectoVIR®-AAV (Ref 120-100, Polyplus) was used as a transfection reagent. 0.4 μg DNA/E6 cells were mixed with FectorVIR-AAV® (0.4 μL/1E6 cells) in Opti-MEM™ I Reduced Serum Medium (5% wv) and incubated for 30 minutes to allow for formation of a transfection complex (C1). In this example, the complexation volume was varied from 5% wv, 7.5% wv, and 10% wv at 15, 30, 45, and 60 minute incubations (Table 13a)

TABLE 13a
Complexation variables experiment design (bold: control)

| Volume (%) | Time (min) |
|---|---|
| 5 | 15 |
| 7.5 | |
| 10 | |
| 5 | 30 |
| 7.5 | |
| 10 | |
| 5 | 45 |
| 7.5 | |
| 10 | |
| 5 | 60 |
| 7.5 | |
| 10 | |

[0647] As seen in FIG. 13, there was no positive impact on transfection efficiency observed with increased complexation volume. Furthermore, similar LLV productivity (˜2E+7 TU/mL at harvest), was observed with 5% complexation volume with incubations ranging from 15-60 minutes. These results for a 5% complexation volume were further confirmed with a second batch LVV production using a dual CAR containing LVV (I1) at 10, 15, 20, 30, 45, and 60 minutes (FIG. 14).

[0648] These data show that varying incubation time and complexation volume does not affect the productivity of infectious LVV but show a stability of the transfection complex over the incubation period.

### Example 13: Robustness of Process

[0649] This example demonstrates the robustness of the production process at varying scales with two different constructs (C1 and I1).

[0650] The lentivirus production was performed as described in Example 5, except for a change in the scale of production. Firstly, FIG. 15 shows the cell growth in a stir tank bioreactor at 50 L scale for construct I1. To further test the robustness with varying constructs, FIG. 16 shows the robustness of the process using two different constructs (C1 and I1) at four different scales (50 L, 2.6 L, 2.5 L shake flask (SF), and 100 mL SF).

[0651] These data show, for example, that the process is reproducible and robust across multiple scales with varying constructs and can be used for the production of many different LVV.

### INCORPORATION BY REFERENCE

[0652] All publications, patents, and Accession numbers mentioned herein are hereby incorporated by reference in their entirety as if each individual publication or patent was specifically and individually indicated to be incorporated by reference.

### EQUIVALENTS

[0653] The disclosures of each and every patent, patent application, and publication cited herein are hereby incorporated herein by reference in their entirety. While this invention has been disclosed with reference to specific aspects, it is apparent that other aspects and variations of this invention may be devised by others skilled in the art without departing from the true spirit and scope of the invention. The appended claims are intended to be construed to include all such aspects and equivalent variations.

The application's sequence listing, which the Patent Office published only in electronic form, follows.

SEQUENCE LISTING (1416 sequences)

SEQ ID NO: 1 - DNA, 1184 bp, Artificial Sequence
  Description of Artificial Sequence: Synthetic polynucleotide
cgtgaggctccggtgcccgtcagtgggcagagcgcacatcgcccacagtccccgagaagttggggggaggggtcggcaattgaaccggtgcctagagaaggtggcgcggggtaaactgggaaagtgatgtcgtgtactggctccgcctttttcccgagggtgggggagaaccgtatataagtgcagtagtcgccgtgaacgttctttttcgcaacgggtttgccgccagaacacaggtaagtgccgtgtgtggttcccgcgggcctggcctctttacgggttatggcccttgcgtgccttgaattacttccacctggctgcagtacgtgattcttgatcccgagcttcgggttggaagtgggtgggagagttcgaggccttgcgcttaaggagccccttcgcctcgtgcttgagttgaggcctggcctgggcgctggggccgccgcgtgcgaatctggtggcaccttcgcgcctgtctcgctgctttcgataagtctctagccatttaaaatttttgatgacctgctgcgacgctttttttctggcaagatagtcttgtaaatgcgggccaagatctgcacactggtatttcggtttttggggccgcgggcggcgacggggcccgtgcgtcccagcgcacatgttcggcgaggcggggcctgcgagcgcggccaccgagaatcggacgggggtagtctcaagctggccggcctgctctggtgcctggcctcgcgccgccgtgtatcgccccgccctgggcggcaaggctggcccggtcggcaccagttgcgtgagcggaaagatggccgcttcccggccctgctgcagggagctcaaaatggaggacgcggcgctcgggagagcgggcgggtgagtcacccacacaaaggaaaagggcctttccgtcctcagccgtcgcttcatgtgactccacggagtaccgggcgccgtccaggcacctcgattagttctcgagcttttggagtacgtcgtctttaggttggggggaggggttttatgcgatggagtttccccacactgagtgggtggagactgaagttaggccagcttggcacttgatgtaattctccttggaatttgccctttttgagtttggatcttggttcattctcaagcctcagacagtggttcaaagtttttttcttccatttcaggtgtcgtga

SEQ ID NO: 2 - protein, 21 aa, Artificial Sequence
  Description of Artificial Sequence: Synthetic peptide
MALPVTALLLPLALLLHAARP

SEQ ID NO: 3 - DNA, 63 bp, Artificial Sequence
  Description of Artificial Sequence: Synthetic oligonucleotide
atggccctgcctgtgacagccctgctgctgcctctggctctgctgctgcatgccgctagaccc

SEQ ID NO: 4 - protein, 45 aa, Artificial Sequence
  Description of Artificial Sequence: Synthetic polypeptide
TTTPAPRPPTPAPTIASQPLSLRPEACRPAAGGAVHTRGLDFACD

SEQ ID NO: 5 - DNA, 135 bp, Artificial Sequence
  Description of Artificial Sequence: Synthetic polynucleotide
accacgacgccagcgccgcgaccaccaacaccggcgcccaccatcgcgtcgcagcccctgtccctgcgcccagaggcgtgccggccagcggcggggggcgcagtgcacacgagggggctggacttcgcctgtgat

SEQ ID NO: 6 - protein, 230 aa, Artificial Sequence
  Description of Artificial Sequence: Synthetic polypeptide
ESKYGPPCPPCPAPEFLGGPSVFLFPPKPKDTLMISRTPEVTCVVVDVSQEDPEVQFNWYVDGVEVHNAKTKPREEQFNSTYRVVSVLTVLHQDWLNGKEYKCKVSNKGLPSSIEKTISKAKGQPREPQVYTLPPSQEEMTKNQVSLTCLVKGFYPSDIAVEWESNGQPENNYKTTPPVLDSDGSFFLYSRLTVDKSRWQEGNVFSCSVMHEALHNHYTQKSLSLSLGKM

SEQ ID NO: 7 - DNA, 690 bp, Artificial Sequence
  Description of Artificial Sequence: Synthetic polynucleotide
gagagcaagtacggccctccctgccccccttgccctgcccccgagttcctgggcggacccagcgtgttcctgttcccccccaagcccaaggacaccctgatgatcagccggacccccgaggtgacctgtgtggtggtggacgtgtcccaggaggaccccgaggtccagttcaactggtacgtggacggcgtggaggtgcacaacgccaagaccaagccccgggaggagcagttcaatagcacctaccgggtggtgtccgtgctgaccgtgctgcaccaggactggctgaacggcaaggaatacaagtgtaaggtgtccaacaagggcctgcccagcagcatcgagaaaaccatcagcaaggccaagggccagcctcgggagccccaggtgtacaccctgccccctagccaagaggagatgaccaagaaccaggtgtccctgacctgcctggtgaagggcttctaccccagcgacatcgccgtggagtgggagagcaacggccagcccgagaacaactacaagaccaccccccctgtgctggacagcgacggcagcttcttcctgtacagccggctgaccgtggacaagagccggtggcaggagggcaacgtctttagctgctccgtgatgcacgaggccctgcacaaccactacacccagaagagcctgagcctgtccctgggcaagatg

SEQ ID NO: 8 - protein, 282 aa, Artificial Sequence
  Description of Artificial Sequence: Synthetic polypeptide
RWPESPKAQASSVPTAQPQAEGSLAKATTAPATTRNTGRGGEEKKKEKEKEEQEERETKTPECPSHTQPLGVYLLTPAVQDLWLRDKATFTCFVVGSDLKDAHLTWEVAGKVPTGGVEEGLLERHSNGSQSQHSRLTLPRSLWNAGTSVTCTLNHPSLPPQRLMALREPAAQAPVKLSLNLLASSDPPEAASWLLCEVSGFSPPNILLMWLEDQREVNTSGFAPARPPPQPGSTTFWAWSVLRVPAPPSPQPATYTCVVSHEDSRTLLNASRSLEVSYVTDH

SEQ ID NO: 9 - DNA, 847 bp, Artificial Sequence
  Description of Artificial Sequence: Synthetic polynucleotide
aggtggcccgaaagtcccaaggcccaggcatctagtgttcctactgcacagccccaggcagaaggcagcctagccaaagctactactgcacctgccactacgcgcaatactggccgtggcggggaggagaagaaaaaggagaaagagaaagaagaacaggaagagagggagaccaagacccctgaatgtccatcccatacccagccgctgggcgtctatctcttgactcccgcagtacaggacttgtggcttagagataaggccacctttacatgtttcgtcgtgggctctgacctgaaggatgcccatttgacttgggaggttgccggaaaggtacccacagggggggttgaggaagggttgctggagcgccattccaatggctctcagagccagcactcaagactcacccttccgagatccctgtggaacgccgggacctctgtcacatgtactctaaatcatcctagcctgcccccacagcgtctgatggcccttagagagccagccgcccaggcaccagttaagcttagcctgaatctgctcgccagtagtgatcccccagaggccgccagctggctcttatgcgaagtgtccggctttagcccgcccaacatcttgctcatgtggctggaggaccagcgagaagtgaacaccagcggcttcgctccagcccggcccccaccccagccgggttctaccacattctgggcctggagtgtcttaagggtcccagcaccacctagcccccagccagccacatacacctgtgttgtgtcccatgaagatagcaggaccctgctaaatgcttctaggagtctggaggtttcctacgtgactgaccatt

SEQ ID NO: 10 - protein, 10 aa, Artificial Sequence
  Description of Artificial Sequence: Synthetic peptide
GGGGSGGGGS

SEQ ID NO: 11 - DNA, 30 bp, Artificial Sequence
  Description of Artificial Sequence: Synthetic oligonucleotide
ggtggcggaggttctggaggtggaggttcc

SEQ ID NO: 12 - protein, 24 aa, Artificial Sequence
  Description of Artificial Sequence: Synthetic peptide
IYIWAPLAGTCGVLLLSLVITLYC

SEQ ID NO: 13 - DNA, 72 bp, Artificial Sequence
  Description of Artificial Sequence: Synthetic oligonucleotide
atctacatctgggcgcccttggccgggacttgtggggtccttctcctgtcactggttatcaccctttactgc

SEQ ID NO: 14 - protein, 42 aa, Artificial Sequence
  Description of Artificial Sequence: Synthetic polypeptide
KRGRKKLLYIFKQPFMRPVQTTQEEDGCSCRFPEEEEGGCEL

SEQ ID NO: 15 - DNA, 126 bp, Artificial Sequence
  Description of Artificial Sequence: Synthetic polynucleotide
aaacggggcagaaagaaactcctgtatatattcaaacaaccatttatgagaccagtacaaactactcaagaggaagatggctgtagctgccgatttccagaagaagaagaaggaggatgtgaactg

SEQ ID NO: 16 - protein, 48 aa, Artificial Sequence
  Description of Artificial Sequence: Synthetic polypeptide
QRRKYRSNKGESPVEPAEPCRYSCPREEEGSTIPIQEDYRKPEPACSP

SEQ ID NO: 17 - DNA, 123 bp, Artificial Sequence
  Description of Artificial Sequence: Synthetic polynucleotide
aggagtaagaggagcaggctcctgcacagtgactacatgaacatgactccccgccgccccgggcccacccgcaagcattaccagccctatgccccaccacgcgacttcgcagcctatcgctcc

SEQ ID NO: 18 - protein, 112 aa, Artificial Sequence
  Description of Artificial Sequence: Synthetic polypeptide
RVKFSRSADAPAYKQGQNQLYNELNLGRREEYDVLDKRRGRDPEMGGKPRRKNPQEGLYNELQKDKMAEAYSEIGMKGERRRGKGHDGLYQGLSTATKDTYDALHMQALPPR

SEQ ID NO: 19 - DNA, 336 bp, Artificial Sequence
  Description of Artificial Sequence: Synthetic polynucleotide
agagtgaagttcagcaggagcgcagacgcccccgcgtacaagcagggccagaaccagctctataacgagctcaatctaggacgaagagaggagtacgatgttttggacaagagacgtggccgggaccctgagatggggggaaagccgagaaggaagaaccctcaggaaggcctgtacaatgaactgcagaaagataagatggcggaggcctacagtgagattgggatgaaaggcgagcgccggaggggcaaggggcacgatggcctttaccagggtctcagtacagccaccaaggacacctacgacgcccttcacatgcaggccctgccccctcgc

SEQ ID NO: 20 - protein, 112 aa, Artificial Sequence
  Description of Artificial Sequence: Synthetic polypeptide
RVKFSRSADAPAYQQGQNQLYNELNLGRREEYDVLDKRRGRDPEMGGKPRRKNPQEGLYNELQKDKMAEAYSEIGMKGERRRGKGHDGLYQGLSTATKDTYDALHMQALPPR

SEQ ID NO: 21 - DNA, 336 bp, Artificial Sequence
  Description of Artificial Sequence: Synthetic polynucleotide
agagtgaagttcagcaggagcgcagacgcccccgcgtaccagcagggccagaaccagctctataacgagctcaatctaggacgaagagaggagtacgatgttttggacaagagacgtggccgggaccctgagatggggggaaagccgagaaggaagaaccctcaggaaggcctgtacaatgaactgcagaaagataagatggcggaggcctacagtgagattgggatgaaaggcgagcgccggaggggcaaggggcacgatggcctttaccagggtctcagtacagccaccaaggacacctacgacgcccttcacatgcaggccctgccccctcgc

SEQ ID NO: 22 - protein, 5 aa, Artificial Sequence
  Description of Artificial Sequence: Synthetic peptide
GGGGS

SEQ ID NO: 23 - DNA, 30 bp, Artificial Sequence; identical to SEQ ID NO: 11
  Description of Artificial Sequence: Synthetic oligonucleotide

SEQ ID NO: 24 - protein, 150 aa, Artificial Sequence [sequence omitted]

SEQ ID NO: 25 - DNA, 450 bp, Artificial Sequence
  Description of Artificial Sequence: Synthetic polynucleotide
cccggatggtttctggactctccggatcgcccgtggaatcccccaaccttctcaccggcactcttggttgtgactgagggcgataatgcgaccttcacgtgctcgttctccaacacctccgaatcattcgtgctgaactggtaccgcatgagcccgtcaaaccagaccgacaagctcgccgcgtttccggaagatcggtcgcaaccgggacaggattgtcggttccgcgtgactcaactgccgaatggcagagacttccacatgagcgtggtccgcgctaggcgaaacgactccgggacctacctgtgcggagccatctcgctggcgcctaaggcccaaatcaaagagagcttgagggccgaactgagagtgaccgagcgcagagctgaggtgccaactgcacatccatccccatcgcctcggcctgcggggcagtttcagaccctggtc

SEQ ID NO: 26 - protein, 394 aa, Artificial Sequence
  Description of Artificial Sequence: Synthetic polypeptide
MALPVTALLLPLALLLHAARPPGWFLDSPDRPWNPPTFSPALLVVTEGDNATFTCSFSNTSESFVLNWYRMSPSNQTDKLAAFPEDRSQPGQDCRFRVTQLPNGRDFHMSVVRARRNDSGTYLCGAISLAPKAQIKESLRAELRVTERRAEVPTAHPSPSPRPAGQFQTLVTTTPAPRPPTPAPTIASQPLSLRPEACRPAAGGAVHTRGLDFACDIYIWAPLAGTCGVLLLSLVITLYCKRGRKKLLYIFKQPFMRPVQTTQEEDGCSCRFPEEEEGGCELRVKFSRSADAPAYKQGQNQLYNELNLGRREEYDVLDKRRGRDPEMGGKPRRKNPQEGLYNELQKDKMAEAYSEIGMKGERRRGKGHDGLYQGLSTATKDTYDALHMQALPPR

SEQ ID NO: 27 - DNA, 1182 bp, Artificial Sequence
  Description of Artificial Sequence: Synthetic polynucleotide
atggccctccctgtcactgccctgcttctccccctcgcactcctgctccacgccgctagaccacccggatggtttctggactctccggatcgcccgtggaatcccccaaccttctcaccggcactcttggttgtgactgagggcgataatgcgaccttcacgtgctcgttctccaacacctccgaatcattcgtgctgaactggtaccgcatgagcccgtcaaaccagaccgacaagctcgccgcgtttccggaagatcggtcgcaaccgggacaggattgtcggttccgcgtgactcaactgccgaatggcagagacttccacatgagcgtggtccgcgctaggcgaaacgactccgggacctacctgtgcggagccatctcgctggcgcctaaggcccaaatcaaagagagcttgagggccgaactgagagtgaccgagcgcagagctgaggtgccaactgcacatccatccccatcgcctcggcctgcggggcagtttcagaccctggtcacgaccactccggcgccgcgcccaccgactccggccccaactatcgcgagccagcccctgtcgctgaggccggaagcatgccgccctgccgccggaggtgctgtgcatacccggggattggacttcgcatgcgacatctacatttgggctcctctcgccggaacttgtggcgtgctccttctgtccctggtcatcaccctgtactgcaagcggggtcggaaaaagcttctgtacattttcaagcagcccttcatgaggcccgtgcaaaccacccaggaggaggacggttgctcctgccggttccccgaagaggaagaaggaggttgcgagctgcgcgtgaagttctcccggagcgccgacgcccccgcctataagcagggccagaaccagctgtacaacgaactgaacctgggacggcgggaagagtacgatgtgctggacaagcggcgcggccgggaccccgaaatgggcgggaagcctagaagaaagaaccctcaggaaggcctgtataacgagctgcagaaggacaagatggccgaggcctactccgaaattgggatgaagggagagcggcggaggggaaaggggcacgacggcctgtaccaaggactgtccaccgccaccaaggacacatacgatgccctgcacatgcaggcccttccccctcgc

SEQ ID NO: 28 - protein, 40 aa, Artificial Sequence
  Description of Artificial Sequence: Synthetic polypeptide
  SITE (1)..(40): This sequence may encompass 1-10 "Gly Gly Gly Ser" repeating units
GGGSGGGSGGGSGGGSGGGSGGGSGGGSGGGSGGGSGGGS

SEQ ID NO: 29 - protein, 20 aa, Artificial Sequence
  Description of Artificial Sequence: Synthetic peptide
GGGGSGGGGSGGGGSGGGGS

SEQ ID NO: 30 - protein, 15 aa, Artificial Sequence
  Description of Artificial Sequence: Synthetic peptide
GGGGSGGGGSGGGGS

SEQ ID NO: 31 - protein, 4 aa, Artificial Sequence
  Description of Artificial Sequence: Synthetic peptide
GGGS

SEQ ID NO: 32-38 - skipped (7 entries)

SEQ ID NO: 39 - protein, 373 aa, Artificial Sequence
  Description of Artificial Sequence: Synthetic polypeptide
PGWFLDSPDRPWNPPTFSPALLVVTEGDNATFTCSFSNTSESFVLNWYRMSPSNQTDKLAAFPEDRSQPGQDCRFRVTQLPNGRDFHMSVVRARRNDSGTYLCGAISLAPKAQIKESLRAELRVTERRAEVPTAHPSPSPRPAGQFQTLVTTTPAPRPPTPAPTIASQPLSLRPEACRPAAGGAVHTRGLDFACDIYIWAPLAGTCGVLLLSLVITLYCKRGRKKLLYIFKQPFMRPVQTTQEEDGCSCRFPEEEEGGCELRVKFSRSADAPAYKQGQNQLYNELNLGRREEYDVLDKRRGRDPEMGGKPRRKNPQEGLYNELQKDKMAEAYSEIGMKGERRRGKGHDGLYQGLSTATKDTYDALHMQALPPR

SEQ ID NO: 40-43 - skipped (4 entries)

SEQ ID NO: 44 - protein, 5 aa, Artificial Sequence
  Description of Artificial Sequence: Synthetic peptide
SYAMS

SEQ ID NO: 45 - protein, 17 aa, Artificial Sequence
  Description of Artificial Sequence: Synthetic peptide
AISGSGGSTYYADSVKG

SEQ ID NO: 46 - protein, 14 aa, Artificial Sequence
  Description of Artificial Sequence: Synthetic peptide
REWVPYDVSWYFDY

SEQ ID NO: 47 - protein, 7 aa, Artificial Sequence
  Description of Artificial Sequence: Synthetic peptide
GFTFSSY

SEQ ID NO: 48 - protein, 6 aa, Artificial Sequence
  Description of Artificial Sequence: Synthetic peptide
SGSGGS

SEQ ID NO: 49 - protein, 8 aa, Artificial Sequence
  Description of Artificial Sequence: Synthetic peptide
GFTFSSYA

SEQ ID NO: 50 - protein, 8 aa, Artificial Sequence
  Description of Artificial Sequence: Synthetic peptide
ISGSGGST

SEQ ID NO: 51 - protein, 16 aa, Artificial Sequence
  Description of Artificial Sequence: Synthetic peptide
ARREWVPYDVSWYFDY

SEQ ID NO: 52 - protein, 123 aa, Artificial Sequence
  Description of Artificial Sequence: Synthetic polypeptide
EVQLLESGGGLVQPGGSLRLSCAASGFTFSSYAMSWVRQAPGKGLEWVSAISGSGGSTYYADSVKGRFTISRDNSKNTLYLQMNSLRAEDTAVYYCARREWVPYDVSWYFDYWGQGTLVTVSS

SEQ ID NO: 53 - DNA, 369 bp, Artificial Sequence
  Description of Artificial Sequence: Synthetic polynucleotide
gaagtgcagttgctggagtcaggcggaggactggtgcagcccggaggatcgcttcgcttgagctgcgcagcctcaggctttaccttctcctcctacgccatgtcctgggtcagacaggctcccgggaagggactggaatgggtgtccgccattagcggttccggcggaagcacttactatgccgactctgtgaagggccgcttcactatctcccgggacaactccaagaacaccctgtatctccaaatgaattccctgagggccgaagataccgcggtgtactactgcgctagacgggagtgggtgccctacgatgtcagctggtacttcgactactggggacagggcactctcgtgactgtgtcctcc

SEQ ID NO: 54 - protein, 11 aa, Artificial Sequence
  Description of Artificial Sequence: Synthetic peptide
RASQSISSYLN

SEQ ID NO: 55 - protein, 7 aa, Artificial Sequence
  Description of Artificial Sequence: Synthetic peptide
AASSLQS

SEQ ID NO: 56 - protein, 9 aa, Artificial Sequence
  Description of Artificial Sequence: Synthetic peptide
QQSYSTPLT

SEQ ID NO: 57 - protein, 7 aa, Artificial Sequence
  Description of Artificial Sequence: Synthetic peptide
SQSISSY

SEQ ID NO: 58 - protein, 3 aa, Artificial Sequence
  Description of Artificial Sequence: Synthetic peptide
AAS

SEQ ID NO: 59 - protein, 6 aa, Artificial Sequence
  Description of Artificial Sequence: Synthetic peptide
SYSTPL

SEQ ID NO: 60 - protein, 6 aa, Artificial Sequence
  Description of Artificial Sequence: Synthetic peptide
QSISSY

SEQ ID NO: 61 - protein, 107 aa, Artificial Sequence [sequence omitted]

SEQ ID NO: 62 - DNA, 321 bp, Artificial Sequence
  Description of Artificial Sequence: Synthetic polynucleotide
gacattcaaatgactcagtccccgtcctccctctccgcctccgtgggagatcgcgtcacgatcacgtgcagggccagccagagcatctccagctacctgaactggtaccagcagaagccagggaaggcaccgaagctcctgatctacgccgctagctcgctgcagtccggcgtcccttcacggttctcgggatcgggctcaggcaccgacttcaccctgaccattagcagcctgcagccggaggacttcgcgacatactactgtcagcagtcatactccacccctctgaccttcggccaagggaccaaagtggagatcaag

SEQ ID NO: 63 - protein, 20 aa, Artificial Sequence
  Description of Artificial Sequence: Synthetic peptide
GGGGSGGGGSGGGGSGGGGS

SEQ ID NO: 64 - protein, 250 aa, Artificial Sequence
  Description of Artificial Sequence: Synthetic polypeptide
EVQLLESGGGLVQPGGSLRLSCAASGFTFSSYAMSWVRQAPGKGLEWVSAISGSGGSTYYADSVKGRFTISRDNSKNTLYLQMNSLRAEDTAVYYCARREWVPYDVSWYFDYWGQGTLVTVSSGGGGSGGGGSGGGGSGGGGSDIQMTQSPSSLSASVGDRVTITCRASQSISSYLNWYQQKPGKAPKLLIYAASSLQSGVPSRFSGSGSGTDFTLTISSLQPEDFATYYCQQSYSTPLTFGQGTKVEIK

SEQ ID NO: 65 - DNA, 750 bp, Artificial Sequence
  Description of Artificial Sequence: Synthetic polynucleotide
gaagtgcagttgctggagtcaggcggaggactggtgcagcccggaggatcgcttcgcttgagctgcgcagcctcaggctttaccttctcctcctacgccatgtcctgggtcagacaggctcccgggaagggactggaatgggtgtccgccattagcggttccggcggaagcacttactatgccgactctgtgaagggccgcttcactatctcccgggacaactccaagaacaccctgtatctccaaatgaattccctgagggccgaagataccgcggtgtactactgcgctagacgggagtgggtgccctacgatgtcagctggtacttcgactactggggacagggcactctcgtgactgtgtcctccggtggtggtggatcggggggtggtggttcgggcggaggaggatctggaggaggagggtcggacattcaaatgactcagtccccgtcctccctctccgcctccgtgggagatcgcgtcacgatcacgtgcagggccagccagagcatctccagctacctgaactggtaccagcagaagccagggaaggcaccgaagctcctgatctacgccgctagctcgctgcagtccggcgtcccttcacggttctcgggatcgggctcaggcaccgacttcaccctgaccattagcagcctgcagccggaggacttcgcgacatactactgtcagcagtcatactccacccctctgaccttcggccaagggaccaaagtggagatcaag

SEQ ID NO: 66 - protein, 473 aa, Artificial Sequence
  Description of Artificial Sequence: Synthetic polypeptide
EVQLLESGGGLVQPGGSLRLSCAASGFTFSSYAMSWVRQAPGKGLEWVSAISGSGGSTYYADSVKGRFTISRDNSKNTLYLQMNSLRAEDTAVYYCARREWVPYDVSWYFDYWGQGTLVTVSSGGGGSGGGGSGGGGSGGGGSDIQMTQSPSSLSASVGDRVTITCRASQSISSYLNWYQQKPGKAPKLLIYAASSLQSGVPSRFSGSGSGTDFTLTISSLQPEDFATYYCQQSYSTPLTFGQGTKVEIKTTTPAPRPPTPAPTIASQPLSLRPEACRPAAGGAVHTRGLDFACDIYIWAPLAGTCGVLLLSLVITLYCKRGRKKLLYIFKQPFMRPVQTTQEEDGCSCRFPEEEEGGCELRVKFSRSADAPAYQQGQNQLYNELNLGRREEYDVLDKRRGRDPEMGGKPRRKNPQEGLYNELQKDKMAEAYSEIGMKGERRRGKGHDGLYQGLSTATKDTYDALHMQALPPR

SEQ ID NO: 67 - DNA, 1419 bp, Artificial Sequence
  Description of Artificial Sequence: Synthetic polynucleotide
gaagtgcagttgctggagtcaggcggaggactggtgcagcccggaggatcgcttcgcttgagctgcgcagcctcaggctttaccttctcctcctacgccatgtcctgggtcagacaggctcccgggaagggactggaatgggtgtccgccattagcggttccggcggaagcacttactatgccgactctgtgaagggccgcttcactatctcccgggacaactccaagaacaccctgtatctccaaatgaattccctgagggccgaagataccgcggtgtactactgcgctagacgggagtgggtgccctacgatgtcagctggtacttcgactactggggacagggcactctcgtgactgtgtcctccggtggtggtggatcggggggtggtggttcgggcggaggaggatctggaggaggagggtcggacattcaaatgactcagtccccgtcctccctctccgcctccgtgggagatcgcgtcacgatcacgtgcagggccagccagagcatctccagctacctgaactggtaccagcagaagccagggaaggcaccgaagctcctgatctacgccgctagctcgctgcagtccggcgtcccttcacggttctcgggatcgggctcaggcaccgacttcaccctgaccattagcagcctgcagccggaggacttcgcgacatactactgtcagcagtcatactccacccctctgaccttcggccaagggaccaaagtggagatcaagaccactaccccagcaccgaggccacccaccccggctcctaccatcgcctcccagcctctgtccctgcgtccggaggcatgtagacccgcagctggtggggccgtgcatacccggggtcttgacttcgcctgcgatatctacatttgggcccctctggctggtacttgcggggtcctgctgctttcactcgtgatcactctttactgtaagcgcggtcggaagaagctgctgtacatctttaagcaacccttcatgaggcctgtgcagactactcaagaggaggacggctgttcatgccggttcccagaggaggaggaaggcggctgcgaactgcgcgtgaaattcagccgcagcgcagatgctccagcctaccagcaggggcagaaccagctctacaacgaactcaatcttggtcggagagaggagtacgacgtgctggacaagcggagaggacgggacccagaaatgggcgggaagccgcgcagaaagaatccccaagagggcctgtacaacgagctccaaaaggataagatggcagaagcctatagcgagattggtatgaaaggggaacgcagaagaggcaaaggccacgacggactgtaccagggactcagcaccgccaccaaggacacctatgacgctcttcacatgcaggccctgccgcctcgg

SEQ ID NO: 68 - protein, 12 aa, Artificial Sequence
  Description of Artificial Sequence: Synthetic peptide
REWWYDDWYLDY

SEQ ID NO: 69 - protein, 14 aa, Artificial Sequence
  Description of Artificial Sequence: Synthetic peptide
ARREWWYDDWYLDY

SEQ ID NO: 70 - protein, 121 aa, Artificial Sequence
  Description of Artificial Sequence: Synthetic polypeptide
EVQLLESGGGLVQPGGSLRLSCAASGFTFSSYAMSWVRQAPGKGLEWVSAISGSGGSTYYADSVKGRFTISRDNSKNTLYLQMNSLRAEDTAVYYCARREWWYDDWYLDYWGQGTLVTVSS

SEQ ID NO: 71 - DNA, 363 bp, Artificial Sequence
  Description of Artificial Sequence: Synthetic polynucleotide
gaagtgcagttgctggagtcaggcggaggactggtgcagcccggaggatcgcttcgcttgagctgcgcagcctcaggctttaccttctcctcctacgccatgtcctgggtcagacaggctcccgggaagggactggaatgggtgtccgccattagcggttccggcggaagcacttactatgccgactctgtgaagggccgcttcactatctcccgggacaactccaagaacaccctgtatctccaaatgaattccctgagggccgaagataccgcggtgtactactgcgctagacgggagtggtggtacgacgattggtacctggactactggggacagggcactctcgtgactgtgtcctcc

SEQ ID NO: 72 - protein, 248 aa, Artificial Sequence
  Description of Artificial Sequence: Synthetic polypeptide
EVQLLESGGGLVQPGGSLRLSCAASGFTFSSYAMSWVRQAPGKGLEWVSAISGSGGSTYYADSVKGRFTISRDNSKNTLYLQMNSLRAEDTAVYYCARREWWYDDWYLDYWGQGTLVTVSSGGGGSGGGGSGGGGSGGGGSDIQMTQSPSSLSASVGDRVTITCRASQSISSYLNWYQQKPGKAPKLLIYAASSLQSGVPSRFSGSGSGTDFTLTISSLQPEDFATYYCQQSYSTPLTFGQGTKVEIK

SEQ ID NO: 73 - DNA, 744 bp, Artificial Sequence
  Description of Artificial Sequence: Synthetic polynucleotide
gaagtgcagttgctggagtcaggcggaggactggtgcagcccggaggatcgcttcgcttgagctgcgcagcctcaggctttaccttctcctcctacgccatgtcctgggtcagacaggctcccgggaagggactggaatgggtgtccgccattagcggttccggcggaagcacttactatgccgactctgtgaagggccgcttcactatctcccgggacaactccaagaacaccctgtatctccaaatgaattccctgagggccgaagataccgcggtgtactactgcgctagacgggagtggtggtacgacgattggtacctggactactggggacagggcactctcgtgactgtgtcctccggtggtggtggatcggggggtggtggttcgggcggaggaggatctggaggaggagggtcggacattcaaatgactcagtccccgtcctccctctccgcctccgtgggagatcgcgtcacgatcacgtgcagggccagccagagcatctccagctacctgaactggtaccagcagaagccagggaaggcaccgaagctcctgatctacgccgctagctcgctgcagtccggcgtcccttcacggttctcgggatcgggctcaggcaccgacttcaccctgaccattagcagcctgcagccggaggacttcgcgacatactactgtcagcagtcatactccacccctctgaccttcggccaagggaccaaagtggagatcaag

SEQ ID NO: 74 - protein, 471 aa, Artificial Sequence
  Description of Artificial Sequence: Synthetic polypeptide
EVQLLESGGGLVQPGGSLRLSCAASGFTFSSYAMSWVRQAPGKGLEWVSAISGSGGSTYYADSVKGRFTISRDNSKNTLYLQMNSLRAEDTAVYYCARREWWYDDWYLDYWGQGTLVTVSSGGGGSGGGGSGGGGSGGGGSDIQMTQSPSSLSASVGDRVTITCRASQSISSYLNWYQQKPGKAPKLLIYAASSLQSGVPSRFSGSGSGTDFTLTISSLQPEDFATYYCQQSYSTPLTFGQGTKVEIKTTTPAPRPPTPAPTIASQPLSLRPEACRPAAGGAVHTRGLDFACDIYIWAPLAGTCGVLLLSLVITLYCKRGRKKLLYIFKQPFMRPVQTTQEEDGCSCRFPEEEEGGCELRVKFSRSADAPAYQQGQNQLYNELNLGRREEYDVLDKRRGRDPEMGGKPRRKNPQEGLYNELQKDKMAEAYSEIGMKGERRRGKGHDGLYQGLSTATKDTYDALHMQALPPR

SEQ ID NO: 75 - DNA, 1413 bp, Artificial Sequence
  Description of Artificial Sequence: Synthetic polynucleotide
gaagtgcagttgctggagtcaggcggaggactggtgcagcccggaggatcgcttcgcttgagctgcgcagcctcaggctttaccttctcctcctacgccatgtcctgggtcagacaggctcccgggaagggactggaatgggtgtccgccattagcggttccggcggaagcacttactatgccgactctgtgaagggccgcttcactatctcccgggacaactccaagaacaccctgtatctccaaatgaattccctgagggccgaagataccgcggtgtactactgcgctagacgggagtggtggtacgacgattggtacctggactactggggacagggcactctcgtgactgtgtcctccggtggtggtggatcggggggtggtggttcgggcggaggaggatctggaggaggagggtcggacattcaaatgactcagtccccgtcctccctctccgcctccgtgggagatcgcgtcacgatcacgtgcagggccagccagagcatctccagctacctgaactggtaccagcagaagccagggaaggcaccgaagctcctgatctacgccgctagctcgctgcagtccggcgtcccttcacggttctcgggatcgggctcaggcaccgacttcaccctgaccattagcagcctgcagccggaggacttcgcgacatactactgtcagcagtcatactccacccctctgaccttcggccaagggaccaaagtggagatcaagaccactaccccagcaccgaggccacccaccccggctcctaccatcgcctcccagcctctgtccctgcgtccggaggcatgtagacccgcagctggtggggccgtgcatacccggggtcttgacttcgcctgcgatatctacatttgggcccctctggctggtacttgcggggtcctgctgctttcactcgtgatcactctttactgtaagcgcggtcggaagaagctgctgtacatctttaagcaacccttcatgaggcctgtgcagactactcaagaggaggacggctgttcatgccggttcccagaggaggaggaaggcggctgcgaactgcgcgtgaaattcagccgcagcgcagatgctccagcctaccagcaggggcagaaccagctctacaacgaactcaatcttggtcggagagaggagtacgacgtgctggacaagcggagaggacgggacccagaaatgggcgggaagccgcgcagaaagaatccccaagagggcctgtacaacgagctccaaaaggataagatggcagaagcctatagcgagattggtatgaaaggggaacgcagaagaggcaaaggccacgacggactgtaccagggactcagcaccgccaccaaggacacctatgacgctcttcacatgcaggccctgccgcctcgg

SEQ ID NO: 76 - protein, 12 aa, Artificial Sequence
  Description of Artificial Sequence: Synthetic peptide
REWWGESWLFDY

SEQ ID NO: 77 - protein, 14 aa, Artificial Sequence
  Description of Artificial Sequence: Synthetic peptide
ARREWWGESWLFDY

SEQ ID NO: 78 - protein, 121 aa, Artificial Sequence
  Description of Artificial Sequence: Synthetic polypeptide
EVQLLESGGGLVQPGGSLRLSCAASGFTFSSYAMSWVRQAPGKGLEWVSAISGSGGSTYYADSVKGRFTISRDNSKNTLYLQMNSLRAEDTAVYYCARREWWGESWLFDYWGQGTLVTVSS

SEQ ID NO: 79 - DNA, 363 bp, Artificial Sequence
  Description of Artificial Sequence: Synthetic polynucleotide
gaagtgcagttgctggagtcaggcggaggactggtgcagcccggaggatcgcttcgcttgagctgcgcagcctcaggctttaccttctcctcctacgccatgtcctgggtcagacaggctcccgggaagggactggaatgggtgtccgccattagcggttccggcggaagcacttactatgccgactctgtgaagggccgcttcactatctcccgggacaactccaagaacaccctgtatctccaaatgaattccctgagggccgaagataccgcggtgtactactgcgctagacgggagtggtggggagaaagctggctgttcgactactggggacagggcactctcgtgactgtgtcctcc

SEQ ID NO: 80 - protein, 248 aa, Artificial Sequence
  Description of Artificial Sequence: Synthetic polypeptide
EVQLLESGGGLVQPGGSLRLSCAASGFTFSSYAMSWVRQAPGKGLEWVSAISGSGGSTYYADSVKGRFTISRDNSKNTLYLQMNSLRAEDTAVYYCARREWWGESWLFDYWGQGTLVTVSSGGGGSGGGGSGGGGSGGGGSDIQMTQSPSSLSASVGDRVTITCRASQSISSYLNWYQQKPGKAPKLLIYAASSLQSGVPSRFSGSGSGTDFTLTISSLQPEDFATYYCQQSYSTPLTFGQGTKVEIK

SEQ ID NO: 81 - DNA, 744 bp, Artificial Sequence
  Description of Artificial Sequence: Synthetic polynucleotide
gaagtgcagttgctggagtcaggcggaggactggtgcagcccggaggatcgcttcgcttgagctgcgcagcctcaggctttaccttctcctcctacgccatgtcctgggtcagacaggctcccgggaagggactggaatgggtgtccgccattagcggttccggcggaagcacttactatgccgactctgtgaagggccgcttcactatctcccgggacaactccaagaacaccctgtatctccaaatgaattccctgagggccgaagataccgcggtgtactactgcgctagacgggagtggtggggagaaagctggctgttcgactactggggacagggcactctcgtgactgtgtcctccggtggtggtggatcggggggtggtggttcgggcggaggaggatctggaggaggagggtcggacattcaaatgactcagtccccgtcctccctctccgcctccgtgggagatcgcgtcacgatcacgtgcagggccagccagagcatctccagctacctgaactggtaccagcagaagccagggaaggcaccgaagctcctgatctacgccgctagctcgctgcagtccggcgtcccttcacggttctcgggatcgggctcaggcaccgacttcaccctgaccattagcagcctgcagccggaggacttcgcgacatactactgtcagcagtcatactccacccctctgaccttcggccaagggaccaaagtggagatcaag

SEQ ID NO: 82 - protein, 471 aa, Artificial Sequence
  Description of Artificial Sequence: Synthetic polypeptide
EVQLLESGGGLVQPGGSLRLSCAASGFTFSSYAMSWVRQAPGKGLEWVSAISGSGGSTYYADSVKGRFTISRDNSKNTLYLQMNSLRAEDTAVYYCARREWWGESWLFDYWGQGTLVTVSSGGGGSGGGGSGGGGSGGGGSDIQMTQSPSSLSASVGDRVTITCRASQSISSYLNWYQQKPGKAPKLLIYAASSLQSGVPSRFSGSGSGTDFTLTISSLQPEDFATYYCQQSYSTPLTFGQGTKVEIKTTTPAPRPPTPAPTIASQPLSLRPEACRPAAGGAVHTRGLDFACDIYIWAPLAGTCGVLLLSLVITLYCKRGRKKLLYIFKQPFMRPVQTTQEEDGCSCRFPEEEEGGCELRVKFSRSADAPAYQQGQNQLYNELNLGRREEYDVLDKRRGRDPEMGGKPRRKNPQEGLYNELQKDKMAEAYSEIGMKGERRRGKGHDGLYQGLSTATKDTYDALHMQALPPR

SEQ ID NO: 83 - DNA, 1413 bp, Artificial Sequence
  Description of Artificial Sequence: Synthetic polynucleotide
gaagtgcagttgctggagtcaggcggaggactggtgcagcccggaggatcgcttcgcttgagctgcgcagcctcaggctttaccttctcctcctacgccatgtcctgggtcagacaggctcccgggaagggactggaatgggtgtccgccattagcggttccggcggaagcacttactatgccgactctgtgaagggccgcttcactatctcccgggacaactccaagaacaccctgtatctccaaatgaattccctgagggccgaagataccgcggtgtactactgcgctagacgggagtggtggggagaaagctggctgttcgactactggggacagggcactctcgtgactgtgtcctccggtggtggtggatcggggggtggtggttcgggcggaggaggatctggaggaggagggtcggacattcaaatgactcagtccccgtcctccctctccgcctccgtgggagatcgcgtcacgatcacgtgcagggccagccagagcatctccagctacctgaactggtaccagcagaagccagggaaggcaccgaagctcctgatctacgccgctagctcgctgcagtccggcgtcccttcacggttctcgggatcgggctcaggcaccgacttcaccctgaccattagcagcctgcagccggaggacttcgcgacatactactgtcagcagtcatactccacccctctgaccttcggccaagggaccaaagtggagatcaagaccactaccccagcaccgaggccacccaccccggctcctaccatcgcctcccagcctctgtccctgcgtccggaggcatgtagacccgcagctggtggggccgtgcatacccggggtcttgacttcgcctgcgatatctacatttgggcccctctggctggtacttgcggggtcctgctgctttcactcgtgatcactctttactgtaagcgcggtcggaagaagctgctgtacatctttaagcaacccttcatgaggcctgtgcagactactcaagaggaggacggctgttcatgccggttcccagaggaggaggaaggcggctgcgaactgcgcgtgaaattcagccgcagcgcagatgctccagcctaccagcaggggcagaaccagctctacaacgaactcaatcttggtcggagagaggagtacgacgtgctggacaagcggagaggacgggacccagaaatgggcgggaagccgcgcagaaagaatccccaagagggcctgtacaacgagctccaaaaggataagatggcagaagcctatagcgagattggtatgaaaggggaacgcagaagaggcaaaggccacgacggactgtaccagggactcagcaccgccaccaaggacacctatgacgctcttcacatgcaggccctgccgcctcgg

SEQ ID NO: 84 - protein, 14 aa, Artificial Sequence
  Description of Artificial Sequence: Synthetic peptide
  MOD_RES (4)..(4): absent or V
  MOD_RES (5)..(5): absent or P
  MOD_RES (6)..(6): W or Y
  MOD_RES (7)..(7): G, Y, or D
  MOD_RES (8)..(8): E, D, or V
  MOD_RES (9)..(9): S or D
  MOD_RES (11)..(11): L or Y
  MOD_RES (12)..(12): F or L
REWXXXXXXWXXDY

SEQ ID NO: 85 - protein, 16 aa, Artificial Sequence
  Description of Artificial Sequence: Synthetic peptide
  MOD_RES (6)..(6): absent or V
  MOD_RES (7)..(7): absent or P
  MOD_RES (8)..(8): W or Y
  MOD_RES (9)..(9): G, Y, or D
  MOD_RES (10)..(10): E, D, or V
  MOD_RES (11)..(11): S or D
  MOD_RES (13)..(13): L or Y
  MOD_RES (14)..(14): F or L
ARREWXXXXXXWXXDY

SEQ ID NO: 86 - protein, 5 aa, Artificial Sequence
  Description of Artificial Sequence: Synthetic peptide
SYGMH

SEQ ID NO: 87 - protein, 17 aa, Artificial Sequence
  Description of Artificial Sequence: Synthetic peptide
VISYDGSNKYYADSVKG

SEQ ID NO: 88 - protein, 14 aa, Artificial Sequence
  Description of Artificial Sequence: Synthetic peptide
SGYALHDDYYGLDV

SEQ ID NO: 89 - protein, 6 aa, Artificial Sequence
  Description of Artificial Sequence: Synthetic peptide
SYDGSN

SEQ ID NO: 90 - protein, 8 aa, Artificial Sequence
  Description of Artificial Sequence: Synthetic peptide
GFTFSSYG

SEQ ID NO: 91 - protein, 8 aa, Artificial Sequence
  Description of Artificial Sequence: Synthetic peptide
ISYDGSNK

SEQ ID NO: 92 - protein, 16 aa, Artificial Sequence
  Description of Artificial Sequence: Synthetic peptide
GGSGYALHDDYYGLDV

SEQ ID NO: 93 - protein, 123 aa, Artificial Sequence
  Description of Artificial Sequence: Synthetic polypeptide
QVQLQESGGGVVQPGRSLRLSCAASGFTFSSYGMHWVRQAPGKGLEWVAVISYDGSNKYYADSVKGRFTISRDNSKNTLYLQMNSLRAEDTAVYYCGGSGYALHDDYYGLDVWGQGTLVTVSS

SEQ ID NO: 94 - DNA, 369 bp, Artificial Sequence
  Description of Artificial Sequence: Synthetic polynucleotide
caagtgcagctgcaggaatccggtggcggagtcgtgcagcctggaaggagcctgagactctcatgcgccgcgtcagggttcaccttttcctcctacgggatgcattgggtcagacaggcccccggaaagggactcgaatgggtggctgtgatcagctacgacggctccaacaagtactacgccgactccgtgaaaggccggttcactatctcccgggacaactccaagaacacgctgtatctgcaaatgaattcactgcgcgcggaggataccgctgtgtactactgcggtggctccggttacgccctgcacgatgactattacggccttgacgtctggggccagggaaccctcgtgactgtgtccagc

SEQ ID NO: 95 - protein, 14 aa, Artificial Sequence
  Description of Artificial Sequence: Synthetic peptide
TGTSSDVGGYNYVS

SEQ ID NO: 96 - protein, 7 aa, Artificial Sequence
  Description of Artificial Sequence: Synthetic peptide
DVSNRPS

SEQ ID NO: 97 - protein, 11 aa, Artificial Sequence
  Description of Artificial Sequence: Synthetic peptide
SSYTSSSTLYV

SEQ ID NO: 98 - protein, 10 aa, Artificial Sequence
  Description of Artificial Sequence: Synthetic peptide
TSSDVGGYNY

SEQ ID NO: 99 - protein, 3 aa, Artificial Sequence
  Description of Artificial Sequence: Synthetic peptide
DVS

SEQ ID NO: 100 - protein, 8 aa, Artificial Sequence
  Description of Artificial Sequence: Synthetic peptide
YTSSSTLY

SEQ ID NO: 101 - protein, 9 aa, Artificial Sequence
  Description of Artificial Sequence: Synthetic peptide
SSDVGGYNY

SEQ ID NO: 102 - protein, 111 aa, Artificial Sequence
  Description of Artificial Sequence: Synthetic polypeptide
QSALTQPASVSGSPGQSITISCTGTSSDVGGYNYVSWYQQHPGKAPKLMIYDVSNRPSGVSNRFSGSKSGNTASLTISGLQAEDEADYYCSSYTSSSTLYVFGSGTKVTVL

SEQ ID NO: 103 - DNA, 333 bp, Artificial Sequence
  Description of Artificial Sequence: Synthetic polynucleotide
cagagcgcactgactcagccggcatccgtgtccggtagccccggacagtcgattaccatctcctgtaccggcacctcctccgacgtgggagggtacaactacgtgtcgtggtaccagcagcacccaggaaaggcccctaagttgatgatctacgatgtgtcaaaccgcccgtctggagtctccaaccggttctccggctccaagtccggcaacaccgccagcctgaccattagcgggctgcaagccgaggatgaggccgactactactgctcgagctacacatcctcgagcaccctctacgtgttcggctcggggactaaggtcaccgtgctg

SEQ ID NO: 104 - protein, 15 aa, Artificial Sequence
  Description of Artificial Sequence: Synthetic peptide
GGGGSGGGGSGGGGS

SEQ ID NO: 105 - protein, 249 aa, Artificial Sequence
  Description of Artificial Sequence: Synthetic polypeptide
QVQLQESGGGVVQPGRSLRLSCAASGFTFSSYGMHWVRQAPGKGLEWVAVISYDGSNKYYADSVKGRFTISRDNSKNTLYLQMNSLRAEDTAVYYCGGSGYALHDDYYGLDVWGQGTLVTVSSGGGGSGGGGSGGGGSQSALTQPASVSGSPGQSITISCTGTSSDVGGYNYVSWYQQHPGKAPKLMIYDVSNRPSGVSNRFSGSKSGNTASLTISGLQAEDEADYYCSSYTSSSTLYVFGSGTKVTVL

SEQ ID NO: 106 - DNA, 747 bp, Artificial Sequence
  Description of Artificial Sequence: Synthetic polynucleotide
caagtgcagctgcaggaatccggtggcggagtcgtgcagcctggaaggagcctgagactctcatgcgccgcgtcagggttcaccttttcctcctacgggatgcattgggtcagacaggcccccggaaagggactcgaatgggtggctgtgatcagctacgacggctccaacaagtactacgccgactccgtgaaaggccggttcactatctcccgggacaactccaagaacacgctgtatctgcaaatgaattcactgcgcgcggaggataccgctgtgtactactgcggtggctccggttacgccctgcacgatgactattacggccttgacgtctggggccagggaaccctcgtgactgtgtccagcggtggaggaggttcgggcggaggaggatcaggagggggtggatcgcagagcgcactgactcagccggcatccgtgtccggtagccccggacagtcgattaccatctcctgtaccggcacctcctccgacgtgggagggtacaactacgtgtcgtggtaccagcagcacccaggaaaggcccctaagttgatgatctacgatgtgtcaaaccgcccgtctggagtctccaaccggttctccggctccaagtccggcaacaccgccagcctgaccattagcgggctgcaagccgaggatgaggccgactactactgctcgagctacacatcctcgagcaccctctacgtgttcggctcggggactaaggtcaccgtgctg

SEQ ID NO: 107 - protein, 472 aa, Artificial Sequence
  Description of Artificial Sequence: Synthetic polypeptide
QVQLQESGGGVVQPGRSLRLSCAASGFTFSSYGMHWVRQAPGKGLEWVAVISYDGSNKYYADSVKGRFTISRDNSKNTLYLQMNSLRAEDTAVYYCGGSGYALHDDYYGLDVWGQGTLVTVSSGGGGSGGGGSGGGGSQSALTQPASVSGSPGQSITISCTGTSSDVGGYNYVSWYQQHPGKAPKLMIYDVSNRPSGVSNRFSGSKSGNTASLTISGLQAEDEADYYCSSYTSSSTLYVFGSGTKVTVLTTTPAPRPPTPAPTIASQPLSLRPEACRPAAGGAVHTRGLDFACDIYIWAPLAGTCGVLLLSLVITLYCKRGRKKLLYIFKQPFMRPVQTTQEEDGCSCRFPEEEEGGCELRVKFSRSADAPAYQQGQNQLYNELNLGRREEYDVLDKRRGRDPEMGGKPRRKNPQEGLYNELQKDKMAEAYSEIGMKGERRRGKGHDGLYQGLSTATKDTYDALHMQALPPR

SEQ ID NO: 108 - DNA, 1416 bp, Artificial Sequence
  Description of Artificial Sequence: Synthetic polynucleotide
caagtgcagctgcaggaatccggtggcggagtcgtgcagcctggaaggagcctgagactctcatgcgccgcgtcagggttcaccttttcctcctacgggatgcattgggtcagacaggcccccggaaagggactcgaatgggtggctgtgatcagctacgacggctccaacaagtactacgccgactccgtgaaaggccggttcactatctcccgggacaactccaagaacacgctgtatctgcaaatgaattcactgcgcgcggaggataccgctgtgtactactgcggtggctccggttacgccctgcacgatgactattacggccttgacgtctggggccagggaaccctcgtgactgtgtccagcggtggaggaggttcgggcggaggaggatcaggagggggtggatcgcagagcgcactgactcagccggcatccgtgtccggtagccccggacagtcgattaccatctcctgtaccggcacctcctccgacgtgggagggtacaactacgtgtcgtggtaccagcagcacccaggaaaggcccctaagttgatgatctacgatgtgtcaaaccgcccgtctggagtctccaaccggttctccggctccaagtccggcaacaccgccagcctgaccattagcgggctgcaagccgaggatgaggccgactactactgctcgagctacacatcctcgagcaccctctacgtgttcggctcggggactaaggtcaccgtgctgaccactaccccagcaccgaggccacccaccccggctcctaccatcgcctcccagcctctgtccctgcgtccggaggcatgtagacccgcagctggtggggccgtgcatacccggggtcttgacttcgcctgcgatatctacatttgggcccctctggctggtacttgcggggtcctgctgctttcactcgtgatcactctttactgtaagcgcggtcggaagaagctgctgtacatctttaagcaacccttcatgaggcctgtgcagactactcaagaggaggacggctgttcatgccggttcccagaggaggaggaaggcggctgcgaactgcgcgtgaaattcagccgcagcgcagatgctccagcctaccagcaggggcagaaccagctctacaacgaactcaatcttggtcggagagaggagtacgacgtgctggacaagcggagaggacgggacccagaaatgggcgggaagccgcgcagaaagaatccccaagagggcctgtacaacgagctccaaaaggataagatggcagaagcctatagcgagattggtatgaaaggggaacgcagaagaggcaaaggccacgacggactgtaccagggactcagcaccgccaccaaggacacctatgacgctcttcacatgcaggccctgccgcctcgg

SEQ ID NO: 109 - protein, 17 aa, Artificial Sequence
  Description of Artificial Sequence: Synthetic peptide
VISYKGSNKYYADSVKG

SEQ ID NO: 110 - protein, 6 aa, Artificial Sequence
  Description of Artificial Sequence: Synthetic peptide
SYKGSN

SEQ ID NO: 111 - protein, 8 aa, Artificial Sequence
  Description of Artificial Sequence: Synthetic peptide
ISYKGSNK

SEQ ID NO: 112 - protein, 123 aa, Artificial Sequence
  Description of Artificial Sequence: Synthetic polypeptide
QVQLVESGGGVVQPGRSLRLSCAASGFTFSSYGMHWVRQAPGKGLEWVAVISYKGSNKYYADSVKGRFTISRDNSKNTLYLQMNSLRAEDTAVYYCGGSGYALHDDYYGLDVWGQGTLVTVSS

SEQ ID NO: 113 - DNA, 369 bp, Artificial Sequence
  Description of Artificial Sequence: Synthetic polynucleotide
caagtgcagcttgtcgaatcgggaggcggagtggtgcagcctggacgatcgctccggctctcatgtgccgcgagcggattcaccttctcgagctacggcatgcactgggtcagacaagccccaggaaagggcctggaatgggtggctgtcatctcgtacaagggctcaaacaagtactacgccgactccgtgaagggccggttcaccatctcccgcgataactccaagaataccctctatctgcaaatgaacagcctgagggccgaggatactgcagtgtactactgcgggggttcaggctacgcgctgcacgacgactactacggattggacgtctggggccaaggaactcttgtgaccgtgtcctct

SEQ ID NO: 114 - protein, 7 aa, Artificial Sequence
  Description of Artificial Sequence: Synthetic peptide
EVSNRLR

SEQ ID NO: 115 - protein, 11 aa, Artificial Sequence
  Description of Artificial Sequence: Synthetic peptide
SSYTSSSALYV

SEQ ID NO: 116 - protein, 3 aa, Artificial Sequence
  Description of Artificial Sequence: Synthetic peptide
EVS

SEQ ID NO: 117 - protein, 8 aa, Artificial Sequence
  Description of Artificial Sequence: Synthetic peptide
YTSSSALY

SEQ ID NO: 118 - protein, 111 aa, Artificial Sequence
  Description of Artificial Sequence: Synthetic polypeptide
QSALTQPASVSGSPGQSITISCTGTSSDVGGYNYVSWYQQHPGKAPKLMIYEVSNRLRGVSNRFSGSKSGNTASLTISGLQAEDEADYYCSSYTSSSALYVFGSGTKVTVL

SEQ ID NO: 119 - DNA, 333 bp, Artificial Sequence
  Description of Artificial Sequence: Synthetic polynucleotide
cagagcgcgctgactcagcctgcctccgtgagcggttcgccgggacagtccattaccatttcgtgcaccgggacctcctccgacgtgggaggctacaactacgtgtcctggtaccagcagcatcccggaaaggccccgaagctgatgatctacgaagtgtcgaacagactgcggggagtctccaaccgcttttccgggtccaagtccggcaacaccgccagcctgaccatcagcgggctccaggcagaagatgaggctgactattactgctcctcctacacgtcaagctccgccctctacgtgttcgggtccgggaccaaagtcactgtgctg

SEQ ID NO: 120 - protein, 254 aa, Artificial Sequence
  Description of Artificial Sequence: Synthetic polypeptide
QVQLVESGGGVVQPGRSLRLSCAASGFTFSSYGMHWVRQAPGKGLEWVAVISYKGSNKYYADSVKGRFTISRDNSKNTLYLQMNSLRAEDTAVYYCGGSGYALHDDYYGLDVWGQGTLVTVSSGGGGSGGGGSGGGGSGGGGSQSALTQPASVSGSPGQSITISCTGTSSDVGGYNYVSWYQQHPGKAPKLMIYEVSNRLRGVSNRFSGSKSGNTASLTISGLQAEDEADYYCSSYTSSSALYVFGSGTKVTVL

SEQ ID NO: 121 - DNA, 762 bp, Artificial Sequence
  Description of Artificial Sequence: Synthetic polynucleotide
caagtgcagcttgtcgaatcgggaggcggagtggtgcagcctggacgatcgctccggctctcatgtgccgcgagcggattcaccttctcgagctacggcatgcactgggtcagacaagccccaggaaagggcctggaatgggtggctgtcatctcgtacaagggctcaaacaagtactacgccgactccgtgaagggccggttcaccatctcccgcgataactccaagaataccctctatctgcaaatgaacagcctgagggccgaggatactgcagtgtactactgcgggggttcaggctacgcgctgcacgacgactactacggattggacgtctggggccaaggaactcttgtgaccgtgtcctctggtggaggcggatcagggggtggcggatctgggggtggtggttccgggggaggaggatcgcagagcgcgctgactcagcctgcctccgtgagcggttcgccgggacagtccattaccatttcgtgcaccgggacctcctccgacgtgggaggctacaactacgtgtcctggtaccagcagcatcccggaaaggccccgaagctgatgatctacgaagtgtcgaacagactgcggggagtctccaaccgcttttccgggtccaagtccggcaacaccgccagcctgaccatcagcgggctccaggcagaagatgaggctgactattactgctcctcctacacgtcaagctccgccctctacgtgttcgggtccgggaccaaagtcactgtgctg

SEQ ID NO: 122 - protein, 477 aa, Artificial Sequence
  Description of Artificial Sequence: Synthetic polypeptide
QVQLVESGGGVVQPGRSLRLSCAASGFTFSSYGMHWVRQAPGKGLEWVAVISYKGSNKYYADSVKGRFTISRDNSKNTLYLQMNSLRAEDTAVYYCGGSGYALHDDYYGLDVWGQGTLVTVSSGGGGSGGGGSGGGGSGGGGSQSALTQPASVSGSPGQSITISCTGTSSDVGGYNYVSWYQQHPGKAPKLMIYEVSNRLRGVSNRFSGSKSGNTASLTISGLQAEDEADYYCSSYTSSSALYVFGSGTKVTVLTTTPAPRPPTPAPTIASQPLSLRPEACRPAAGGAVHTRGLDFACDIYIWAPLAGTCGVLLLSLVITLYCKRGRKKLLYIFKQPFMRPVQTTQEEDGCSCRFPEEEEGGCELRVKFSRSADAPAYQQGQNQLYNELNLGRREEYDVLDKRRGRDPEMGGKPRRKNPQEGLYNELQKDKMAEAYSEIGMKGERRRGKGHDGLYQGLSTATKDTYDALHMQALPPR

SEQ ID NO: 123 - DNA, 1431 bp, Artificial Sequence
  Description of Artificial Sequence: Synthetic polynucleotide
caagtgcagcttgtcgaatcgggaggcggagtggtgcagcctggacgatcgctccggctctcatgtgccgcgagcggattcaccttctcgagctacggcatgcactgggtcagacaagccccaggaaagggcctggaatgggtggctgtcatctcgtacaagggctcaaacaagtactacgccgactccgtgaagggccggttcaccatctcccgcgataactccaagaataccctctatctgcaaatgaacagcctgagggccgaggatactgcagtgtactactgcgggggttcaggctacgcgctgcacgacgactactacggattggacgtctggggccaaggaactcttgtgaccgtgtcctctggtggaggcggatcagggggtggcggatctgggggtggtggttccgggggaggaggatcgcagagcgcgctgactcagcctgcctccgtgagcggttcgccgggacagtccattaccatttcgtgcaccgggacctcctccgacgtgggaggctacaactacgtgtcctggtaccagcagcatcccggaaaggccccgaagctgatgatctacgaagtgtcgaacagactgcggggagtctccaaccgcttttccgggtccaagtccggcaacaccgccagcctgaccatcagcgggctccaggcagaagatgaggctgactattactgctcctcctacacgtcaagctccgccctctacgtgttcgggtccgggaccaaagtcactgtgctgaccactaccccagcaccgaggccacccaccccggctcctaccatcgcctcccagcctctgtccctgcgtccggaggcatgtagacccgcagctggtggggccgtgcatacccggggtcttgacttcgcctgcgatatctacatttgggcccctctggctggtacttgcggggtcctgctgctttcactcgtgatcactctttactgtaagcgcggtcggaagaagctgctgtacatctttaagcaacccttcatgaggcctgtgcagactactcaagaggaggacggctgttcatgccggttcccagaggaggaggaaggcggctgcgaactgcgcgtgaaattcagccgcagcgcagatgctccagcctaccagcaggggcagaaccagctctacaacgaactcaatcttggtcggagagaggagtacgacgtgctggacaagcggagaggacgggacccagaaatgggcgggaagccgcgcagaaagaatccccaagagggcctgtacaacgagctccaaaaggataagatggcagaagcctatagcgagattggtatgaaaggggaacgcagaagaggcaaaggccacgacggactgtaccagggactcagcaccgccaccaaggacacctatgacgctcttcacatgcaggccctgccgcctcgg

SEQ ID NO: 124 - protein, 111 aa, Artificial Sequence
  Description of Artificial Sequence: Synthetic polypeptide
QSALTQPASVSGSPGQSITISCTGTSSDVGGYNYVSWYQQHPGKAPKLMIYEVSNRLRGVSNRFSGSKSGNTASLTISGLQAEDEADYYCSSYTSSSTLYVFGSGTKVTVL

SEQ ID NO: 125 - DNA, 333 bp, Artificial Sequence
  Description of Artificial Sequence: Synthetic polynucleotide
cagagcgcgctgactcagcctgcctccgtgagcggttcgccgggacagtccattaccatttcgtgcaccgggacctcctccgacgtgggaggctacaactacgtgtcctggtaccagcagcatcccggaaaggccccgaagctgatgatctacgaagtgtcgaacagactgcggggagtctccaaccgcttttccgggtccaagtccggcaacaccgccagcctgaccatcagcgggctccaggcagaagatgaggctgactattactgctcctcctacacgtcaagctccaccctctacgtgttcgggtccgggaccaaagtcactgtgctg

SEQ ID NO: 126 - protein, 254 aa, Artificial Sequence
  Description of Artificial Sequence: Synthetic polypeptide
QVQLVESGGGVVQPGRSLRLSCAASGFTFSSYGMHWVRQAPGKGLEWVAVISYKGSNKYYADSVKGRFTISRDNSKNTLYLQMNSLRAEDTAVYYCGGSGYALHDDYYGLDVWGQGTLVTVSSGGGGSGGGGSGGGGSGGGGSQSALTQPASVSGSPGQSITISCTGTSSDVGGYNYVSWYQQHPGKAPKLMIYEVSNRLRGVSNRFSGSKSGNTASLTISGLQAEDEADYYCSSYTSSSTLYVFGSGTKVTVL

SEQ ID NO: 127 - DNA, 762 bp, Artificial Sequence
  Description of Artificial Sequence: Synthetic polynucleotide
caagtgcagcttgtcgaatcgggaggcggagtggtgcagcctggacgatcgctccggctctcatgtgccgcgagcggattcaccttctcgagctacggcatgcactgggtcagacaagccccaggaaagggcctggaatgggtggctgtcatctcgtacaagggctcaaacaagtactacgccgactccgtgaagggccggttcaccatctcccgcgataactccaagaataccctctatctgcaaatgaacagcctgagggccgaggatactgcagtgtactactgcgggggttcaggctacgcgctgcacgacgactactacggattggacgtctggggccaaggaactcttgtgaccgtgtcctctggtggaggcggatcagggggtggcggatctgggggtggtggttccgggggaggaggatcgcagagcgcgctgactcagcctgcctccgtgagcggttcgccgggacagtccattaccatttcgtgcaccgggacctcctccgacgtgggaggctacaactacgtgtcctggtaccagcagcatcccggaaaggccccgaagctgatgatctacgaagtgtcgaacagactgcggggagtctccaaccgcttttccgggtccaagtccggcaacaccgccagcctgaccatcagcgggctccaggcagaagatgaggctgactattactgctcctcctacacgtcaagctccaccctctacgtgttcgggtccgggaccaaagtcactgtgctg

SEQ ID NO: 128 - protein, 477 aa, Artificial Sequence
  Description of Artificial Sequence: Synthetic polypeptide
QVQLVESGGGVVQPGRSLRLSCAASGFTFSSYGMHWVRQAPGKGLEWVAVISYKGSNKYYADSVKGRFTISRDNSKNTLYLQMNSLRAEDTAVYYCGGSGYALHDDYYGLDVWGQGTLVTVSSGGGGSGGGGSGGGGSGGGGSQSALTQPASVSGSPGQSITISCTGTSSDVGGYNYVSWYQQHPGKAPKLMIYEVSNRLRGVSNRFSGSKSGNTASLTISGLQAEDEADYYCSSYTSSSTLYVFGSGTKVTVLTTTPAPRPPTPAPTIASQPLSLRPEACRPAAGGAVHTRGLDFACDIYIWAPLAGTCGVLLLSLVITLYCKRGRKKLLYIFKQPFMRPVQTTQEEDGCSCRFPEEEEGGCELRVKFSRSADAPAYQQGQNQLYNELNLGRREEYDVLDKRRGRDPEMGGKPRRKNPQEGLYNELQKDKMAEAYSEIGMKGERRRGKGHDGLYQGLSTATKDTYDALHMQALPPR

SEQ ID NO: 129 - DNA, 1431 bp, Artificial Sequence
  Description of Artificial Sequence: Synthetic polynucleotide
caagtgcagcttgtcgaatcgggaggcggagtggtgcagcctggacgatcgctccggctctcatgtgccgcgagcggattcaccttctcgagctacggcatgcactgggtcagacaagccccaggaaagggcctggaatgggtggctgtcatctcgtacaagggctcaaacaagtactacgccgactccgtgaagggccggttcaccatctcccgcgataactccaagaataccctctatctgcaaatgaacagcctgagggccgaggatactgcagtgtactactgcgggggttcaggctacgcgctgcacgacgactactacggattggacgtctggggccaaggaactcttgtgaccgtgtcctctggtggaggcggatcagggggtggcggatctgggggtggtggttccgggggaggaggatcgcagagcgcgctgactcagcctgcctccgtgagcggttcgccgggacagtccattaccatttcgtgcaccgggacctcctccgacgtgggaggctacaactacgtgtcctggtaccagcagcatcccggaaaggccccgaagctgatgatctacgaagtgtcgaacagactgcggggagtctccaaccgcttttccgggtccaagtccggcaacaccgccagcctgaccatcagcgggctccaggcagaagatgaggctgactattactgctcctcctacacgtcaagctccaccctctacgtgttcgggtccgggaccaaagtcactgtgctgaccactaccccagcaccgaggccacccaccccggctcctaccatcgcctcccagcctctgtccctgcgtccggaggcatgtagacccgcagctggtggggccgtgcatacccggggtcttgacttcgcctgcgatatctacatttgggcccctctggctggtacttgcggggtcctgctgctttcactcgtgatcactctttactgtaagcgcggtcggaagaagctgctgtacatctttaagcaacccttcatgaggcctgtgcagactactcaagaggaggacggctgttcatgccggttcccagaggaggaggaaggcggctgcgaactgcgcgtgaaattcagccgcagcgcagatgctccagcctaccagcaggggcagaaccagctctacaacgaactcaatcttggtcggagagaggagtacgacgtgctggacaagcggagaggacgggacccagaaatgggcgggaagccgcgcagaaagaatccccaagagggcctgtacaacgagctccaaaaggataagatggcagaagcctatagcgagattggtatgaaaggggaacgcagaagaggcaaaggccacgacggactgtaccagggactcagcaccgccaccaaggacacctatgacgctcttcacatgcaggccctgccgcctcgg

SEQ ID NO: 130 - protein, 17 aa, Artificial Sequence
  Description of Artificial Sequence: Synthetic peptide
  MOD_RES (5)..(5): D or K
VISYXGSNKYYADSVKG

SEQ ID NO: 131 - protein, 7 aa, Artificial Sequence
  Description of Artificial Sequence: Synthetic peptide
  MOD_RES (1)..(1): D or E
  MOD_RES (6)..(6): P or L
  MOD_RES (7)..(7): S or R
XVSNRXX

SEQ ID NO: 132 - protein, 11 aa, Artificial Sequence
  Description of Artificial Sequence: Synthetic peptide
  MOD_RES (8)..(8): T or A
SSYTSSSXLYV

SEQ ID NO: 133 - protein, 6 aa, Artificial Sequence
  Description of Artificial Sequence: Synthetic peptide
  MOD_RES (3)..(3): D or K
SYXGSN

SEQ ID NO: 134 - protein, 3 aa, Artificial Sequence
  Description of Artificial Sequence: Synthetic peptide
  MOD_RES (1)..(1): D or E
XVS

SEQ ID NO: 135 - protein, 8 aa, Artificial Sequence
  Description of Artificial Sequence: Synthetic peptide
  MOD_RES (6)..(6): T or A
YTSSSXLY

SEQ ID NO: 136 - protein, 8 aa, Artificial Sequence
  Description of Artificial Sequence: Synthetic peptide
  MOD_RES (4)..(4): D or K
ISYXGSNK

SEQ ID NO: 137 - protein, 5 aa, Artificial Sequence
  Description of Artificial Sequence: Synthetic peptide
GFWMS

SEQ ID NO: 138 - protein, 17 aa, Artificial Sequence
  Description of Artificial Sequence: Synthetic peptide
NIKQDGSEKYYVDSVRG

SEQ ID NO: 139 - protein, 9 aa, Artificial Sequence
  Description of Artificial Sequence: Synthetic peptide
ALDYYGMDV

SEQ ID NO: 140 - protein, 7 aa, Artificial Sequence
  Description of Artificial Sequence: Synthetic peptide
GFTFSGF

SEQ ID NO: 141 - protein, 6 aa, Artificial Sequence
  Description of Artificial Sequence: Synthetic peptide
KQDGSE

SEQ ID NO: 142 - protein, 8 aa, Artificial Sequence
  Description of Artificial Sequence: Synthetic peptide
GFTFSGFW

SEQ ID NO: 143 - protein, 8 aa, Artificial Sequence
  Description of Artificial Sequence: Synthetic peptide
IKQDGSEK

SEQ ID NO: 144 - protein, 11 aa, Artificial Sequence
  Description of Artificial Sequence: Synthetic peptide
ARALDYYGMDV

SEQ ID NO: 145 - protein, 118 aa, Artificial Sequence
  Description of Artificial Sequence: Synthetic polypeptide
EVQLVESGGGLVQPGGSLRLSCAASGFTFSGFWMSWVRQAPGKGLEWVANIKQDGSEKYYVDSVRGRFTISRDNAKNSLYLQMNSLRAEDTAVYYCARALDYYGMDVWGQGTTVTVSS

SEQ ID NO: 146 - DNA, 354 bp, Artificial Sequence
  Description of Artificial Sequence: Synthetic polynucleotide
gaagtgcaactggtggagagcggtggagggcttgtccagcccggaggatcgctgcggctgtcctgtgctgcgtccgggttcaccttctccggcttctggatgtcctgggtcagacaggcaccgggaaagggcctcgaatgggtggccaacatcaagcaggatggctccgagaagtactacgtcgactccgtgagaggccgcttcaccatctcccgggacaacgccaagaactcgctgtacctccaaatgaatagcctcagggcggaagatactgctgtgtattactgcgcacgcgcccttgactactacggcatggacgtctggggccaagggaccactgtgaccgtgtctagc

SEQ ID NO: 147 - protein, 17 aa, Artificial Sequence
  Description of Artificial Sequence: Synthetic peptide
RSSQSLLDSDDGNTYLD

SEQ ID NO: 148 - protein, 7 aa, Artificial Sequence
  Description of Artificial Sequence: Synthetic peptide
TLSYRAS

SEQ ID NO: 149 - protein, 10 aa, Artificial Sequence
  Description of Artificial Sequence: Synthetic peptide
TQRLEFPSIT

SEQ ID NO: 150 - protein, 13 aa, Artificial Sequence
  Description of Artificial Sequence: Synthetic peptide
SQSLLDSDDGNTY

SEQ ID NO: 151 - protein, 3 aa, Artificial Sequence
  Description of Artificial Sequence: Synthetic peptide
TLS

SEQ ID NO: 152 - protein, 7 aa, Artificial Sequence
  Description of Artificial Sequence: Synthetic peptide
RLEFPSI

SEQ ID NO: 153 - protein, 12 aa, Artificial Sequence
  Description of Artificial Sequence: Synthetic peptide
QSLLDSDDGNTY

SEQ ID NO: 154 - protein, 114 aa, Artificial Sequence
  Description of Artificial Sequence: Synthetic polypeptide
DIVMTQTPLSLPVTPGEPASISCRSSQSLLDSDDGNTYLDWYLQKPGQSPRLLIYTLSYRASGVPDRFSGSGSGTDFTLKISRVEAEDVGLYYCTQRLEFPSITFGQGTRLEIK

SEQ ID NO: 155 - DNA, 342 bp, Artificial Sequence
  Description of Artificial Sequence: Synthetic polynucleotide
gatatcgtgatgacccagactcccctgtccctgcctgtgactcccggagaaccagcctccatttcctgccggtcctcccagtccctgctggacagcgacgacggcaacacttacctggactggtacttgcagaagccgggccaatcgcctcgcctgctgatctataccctgtcataccgggcctcaggagtgcctgaccgcttctcgggatcagggagcgggaccgatttcaccctgaaaatttcccgagtggaagccgaggacgtcggactgtactactgcacccagcgcctcgaattcccgtcgattacgtttggacagggtacccggcttgagatcaag

SEQ ID NO: 156 - protein, 252 aa, Artificial Sequence
  Description of Artificial Sequence: Synthetic polypeptide
EVQLVESGGGLVQPGGSLRLSCAASGFTFSGFWMSWVRQAPGKGLEWVANIKQDGSEKYYVDSVRGRFTISRDNAKNSLYLQMNSLRAEDTAVYYCARALDYYGMDVWGQGTTVTVSSGGGGSGGGGSGGGGSGGGGSDIVMTQTPLSLPVTPGEPASISCRSSQSLLDSDDGNTYLDWYLQKPGQSPRLLIYTLSYRASGVPDRFSGSGSGTDFTLKISRVEAEDVGLYYCTQRLEFPSITFGQGTRLEIK

SEQ ID NO: 157 - DNA, 756 bp, Artificial Sequence
  Description of Artificial Sequence: Synthetic polynucleotide
gaagtgcaactggtggagagcggtggagggcttgtccagcccggaggatcgctgcggctgtcctgtgctgcgtccgggttcaccttctccggcttctggatgtcctgggtcagacaggcaccgggaaagggcctcgaatgggtggccaacatcaagcaggatggctccgagaagtactacgtcgactccgtgagaggccgcttcaccatctcccgggacaacgccaagaactcgctgtacctccaaatgaatagcctcagggcggaagatactgctgtgtattactgcgcacgcgcccttgactactacggcatggacgtctggggccaagggaccactgtgaccgtgtctagcggaggcggaggttcagggggcggtggatcaggcggaggaggatcggggggtggtggatcggatatcgtgatgacccagactcccctgtccctgcctgtgactcccggagaaccagcctccatttcctgccggtcctcccagtccctgctggacagcgacgacggcaacacttacctggactggtacttgcagaagccgggccaatcgcctcgcctgctgatctataccctgtcataccgggcctcaggagtgcctgaccgcttctcgggatcagggagcgggaccgatttcaccctgaaaatttcccgagtggaagccgaggacgtcggactgtactactgcacccagcgcctcgaattcccgtcgattacgtttggacagggtacccggcttgagatcaag

SEQ ID NO: 158 - protein, 475 aa, Artificial Sequence
  Description of Artificial Sequence: Synthetic polypeptide
EVQLVESGGGLVQPGGSLRLSCAASGFTFSGFWMSWVRQAPGKGLEWVANIKQDGSEKYYVDSVRGRFTISRDNAKNSLYLQMNSLRAEDTAVYYCARALDYYGMDVWGQGTTVTVSSGGGGSGGGGSGGGGSGGGGSDIVMTQTPLSLPVTPGEPASISCRSSQSLLDSDDGNTYLDWYLQKPGQSPRLLIYTLSYRASGVPDRFSGSGSGTDFTLKISRVEAEDVGLYYCTQRLEFPSITFGQGTRLEIKTTTPAPRPPTPAPTIASQPLSLRPEACRPAAGGAVHTRGLDFACDIYIWAPLAGTCGVLLLSLVITLYCKRGRKKLLYIFKQPFMRPVQTTQEEDGCSCRFPEEEEGGCELRVKFSRSADAPAYQQGQNQLYNELNLGRREEYDVLDKRRGRDPEMGGKPRRKNPQEGLYNELQKDKMAEAYSEIGMKGERRRGKGHDGLYQGLSTATKDTYDALHMQALPPR

SEQ ID NO: 159 - DNA, 1425 bp, Artificial Sequence
  Description of Artificial Sequence: Synthetic polynucleotide
gaagtgcaactggtggagagcggtggagggcttgtccagcccggaggatcgctgcggctgtcctgtgctgcgtccgggttcaccttctccggcttctggatgtcctgggtcagacaggcaccgggaaagggcctcgaatgggtggccaacatcaagcaggatggctccgagaagtactacgtcgactccgtgagaggccgcttcaccatctcccgggacaacgccaagaactcgctgtacctccaaatgaatagcctcagggcggaagatactgctgtgtattactgcgcacgcgcccttgactactacggcatggacgtctggggccaagggaccactgtgaccgtgtctagcggaggcggaggttcagggggcggtggatcaggcggaggaggatcggggggtggtggatcggatatcgtgatgacccagactcccctgtccctgcctgtgactcccggagaaccagcctccatttcctgccggtcctcccagtccctgctggacagcgacgacggcaacacttacctggactggtacttgcagaagccgggccaatcgcctcgcctgctgatctataccctgtcataccgggcctcaggagtgcctgaccgcttctcgggatcagggagcgggaccgatttcaccctgaaaatttcccgagtggaagccgaggacgtcggactgtactactgcacccagcgcctcgaattcccgtcgattacgtttggacagggtacccggcttgagatcaagaccactaccccagcaccgaggccacccaccccggctcctaccatcgcctcccagcctctgtccctgcgtccggaggcatgtagacccgcagctggtggggccgtgcatacccggggtcttgacttcgcctgcgatatctacatttgggcccctctggctggtacttgcggggtcctgctgctttcactcgtgatcactctttactgtaagcgcggtcggaagaagctgctgtacatctttaagcaacccttcatgaggcctgtgcagactactcaagaggaggacggctgttcatgccggttcccagaggaggaggaaggcggctgcgaactgcgcgtgaaattcagccgcagcgcagatgctccagcctaccagcaggggcagaaccagctctacaacgaactcaatcttggtcggagagaggagtacgacgtgctggacaagcggagaggacgggacccagaaatgggcgggaagccgcgcagaaagaatccccaagagggcctgtacaacgagctccaaaaggataagatggcagaagcctatagcgagattggtatgaaaggggaacgcagaagaggcaaaggccacgacggactgtaccagggactcagcaccgccaccaaggacacctatgacgctcttcacatgcaggccctgccgcctcgg

SEQ ID NO: 160 - protein, 5 aa, Artificial Sequence
  Description of Artificial Sequence: Synthetic peptide
SFRMN

SEQ ID NO: 161 - protein, 17 aa, Artificial Sequence
  Description of Artificial Sequence: Synthetic peptide
SISSSSSYIYYADSVKG

SEQ ID NO: 162 - protein, 9 aa, Artificial Sequence
  Description of Artificial Sequence: Synthetic peptide
WLSYYGMDV

SEQ ID NO: 163 - protein, 7 aa, Artificial Sequence
  Description of Artificial Sequence: Synthetic peptide
GFTFSSF

SEQ ID NO: 164 - protein, 6 aa, Artificial Sequence
  Description of Artificial Sequence: Synthetic peptide
SSSSSY

SEQ ID NO: 165 - protein, 8 aa, Artificial Sequence
  Description of Artificial Sequence: Synthetic peptide
GFTFSSFR

SEQ ID NO: 166 - protein, 8 aa, Artificial Sequence
  Description of Artificial Sequence: Synthetic peptide
ISSSSSYI

SEQ ID NO: 167 - protein, 11 aa, Artificial Sequence
  Description of Artificial Sequence: Synthetic peptide
ARWLSYYGMDV

SEQ ID NO: 168 - protein, 118 aa, Artificial Sequence
  Description of Artificial Sequence: Synthetic polypeptide
EVQLVESGGGLVKPGGSLRLSCAASGFTFSSFRMNWVRQAPGKGLEWVSSISSSSSYIYYADSVKGRFTISRDNAKNSLYLQMNSLRAEDTAVYYCARWLSYYGMDVWGQGTTVTVSS

SEQ ID NO: 169 - DNA, 354 bp, Artificial Sequence
  Description of Artificial Sequence: Synthetic polynucleotide
gaagtgcaactggtggagagcggtggagggcttgtcaagcccggaggatcgctgcggctgtcctgtgctgcgtccgggttcaccttctcctcgttccgcatgaactgggtcagacaggcaccgggaaagggcctcgaatgggtgtcctcaatctcatcgtcctcgtcctacatctactacgccgactccgtgaaaggccgcttcaccatctcccgggacaacgccaagaactcgctgtacctccaaatgaatagcctcagggcggaagatactgctgtgtattactgcgcacgctggctttcctactacggcatggacgtctggggccaagggaccactgtgaccgtgtctagc

SEQ ID NO: 170 - protein, 7 aa, Artificial Sequence
  Description of Artificial Sequence: Synthetic peptide
TLSFRAS

SEQ ID NO: 171 - protein, 9 aa, Artificial Sequence
  Description of Artificial Sequence: Synthetic peptide
MQRIGFPIT

SEQ ID NO: 172 - protein, 6 aa, Artificial Sequence
  Description of Artificial Sequence: Synthetic peptide
RIGFPI

SEQ ID NO: 173 - protein, 113 aa, Artificial Sequence
  Description of Artificial Sequence: Synthetic polypeptide
DIVMTQTPLSLPVTPGEPASISCRSSQSLLDSDDGNTYLDWYLQKPGQSPQLLIYTLSFRASGVPDRFSGSGSGTDFTLKIRRVEAEDVGVYYCMQRIGFPITFGQGTRLEIK

SEQ ID NO: 174 - DNA, 339 bp, Artificial Sequence
  Description of Artificial Sequence: Synthetic polynucleotide
gatatcgtgatgacccagactcccctgtccctgcctgtgactcccggagaaccagcctccatttcctgccggtcctcccagtccctgctggacagcgacgacggcaacacttacctggactggtacttgcagaagccgggccaatcgcctcagctgctgatctataccctgtcattccgggcctcaggagtgcctgaccgcttctcgggatcagggagcgggaccgatttcaccctgaaaattaggcgagtggaagccgaggacgtcggagtgtactactgcatgcagcgcatcggcttcccgattacgtttggacagggtacccggcttgagatcaag

SEQ ID NO: 175 - protein, 251 aa, Artificial Sequence
  Description of Artificial Sequence: Synthetic polypeptide
EVQLVESGGGLVKPGGSLRLSCAASGFTFSSFRMNWVRQAPGKGLEWVSSISSSSSYIYYADSVKGRFTISRDNAKNSLYLQMNSLRAEDTAVYYCARWLSYYGMDVWGQGTTVTVSSGGGGSGGGGSGGGGSGGGGSDIVMTQTPLSLPVTPGEPASISCRSSQSLLDSDDGNTYLDWYLQKPGQSPQLLIYTLSFRASGVPDRFSGSGSGTDFTLKIRRVEAEDVGVYYCMQRIGFPITFGQGTRLEIK

SEQ ID NO: 176 - DNA, 753 bp, Artificial Sequence
  Description of Artificial Sequence: Synthetic polynucleotide
gaagtgcaactggtggagagcggtggagggcttgtcaagcccggaggatcgctgcggctgtcctgtgctgcgtccgggttcaccttctcctcgttccgcatgaactgggtcagacaggcaccgggaaagggcctcgaatgggtgtcctcaatctcatcgtcctcgtcctacatctactacgccgactccgtgaaaggccgcttcaccatctcccgggacaacgccaagaactcgctgtacctccaaatgaatagcctcagggcggaagatactgctgtgtattactgcgcacgctggctttcctactacggcatggacgtctggggccaagggaccactgtgaccgtgtctagcggaggcggaggttcagggggcggtggatcaggcggaggaggatcggggggtggtggatcggatatcgtgatgacccagactcccctgtccctgcctgtgactcccggagaaccagcctccatttcctgccggtcctcccagtccctgctggacagcgacgacggcaacacttacctggactggtacttgcagaagccgggccaatcgcctcagctgctgatctataccctgtcattccgggcctcaggagtgcctgaccgcttctcgggatcagggagcgggaccgatttcaccctgaaaattaggcgagtggaagccgaggacgtcggagtgtactactgcatgcagcgcatcggcttcccgattacgtttggacagggtacccggcttgagatcaag

SEQ ID NO: 177 - protein, 474 aa, Artificial Sequence
  Description of Artificial Sequence: Synthetic polypeptide
EVQLVESGGGLVKPGGSLRLSCAASGFTFSSFRMNWVRQAPGKGLEWVSSISSSSSYIYYADSVKGRFTISRDNAKNSLYLQMNSLRAEDTAVYYCARWLSYYGMDVWGQGTTVTVSSGGGGSGGGGSGGGGSGGGGSDIVMTQTPLSLPVTPGEPASISCRSSQSLLDSDDGNTYLDWYLQKPGQSPQLLIYTLSFRASGVPDRFSGSGSGTDFTLKIRRVEAEDVGVYYCMQRIGFPITFGQGTRLEIKTTTPAPRPPTPAPTIASQPLSLRPEACRPAAGGAVHTRGLDFACDIYIWAPLAGTCGVLLLSLVITLYCKRGRKKLLYIFKQPFMRPVQTTQEEDGCSCRFPEEEEGGCELRVKFSRSADAPAYQQGQNQLYNELNLGRREEYDVLDKRRGRDPEMGGKPRRKNPQEGLYNELQKDKMAEAYSEIGMKGERRRGKGHDGLYQGLSTATKDTYDALHMQALPPR

SEQ ID NO: 178 - DNA, 1422 bp, Artificial Sequence
  Description of Artificial Sequence: Synthetic polynucleotide
gaagtgcaactggtggagagcggtggagggcttgtcaagcccggaggatcgctgcggctgtcctgtgctgcgtccgggttcaccttctcctcgttccgcatgaactgggtcagacaggcaccgggaaagggcctcgaatgggtgtcctcaatctcatcgtcctcgtcctacatctactacgccgactccgtgaaaggccgcttcaccatctcccgggacaacgccaagaactcgctgtacctccaaatgaatagcctcagggcggaagatactgctgtgtattactgcgcacgctggctttcctactacggcatggacgtctggggccaagggaccactgtgaccgtgtctagcggaggcggaggttcagggggcggtggatcaggcggaggaggatcggggggtggtggatcggatatcgtgatgacccagactcccctgtccctgcctgtgactcccggagaaccagcctccatttcctgccggtcctcccagtccctgctggacagcgacgacggcaacacttacctggactggtacttgcagaagccgggccaatcgcctcagctgctgatctataccctgtcattccgggcctcaggagtgcctgaccgcttctcgggatcagggagcgggaccgatttcaccctgaaaattaggcgagtggaagccgaggacgtcggagtgtactactgcatgcagcgcatcggcttcccgattacgtttggacagggtacccggcttgagatcaagaccactaccccagcaccgaggccacccaccccggctcctaccatcgcctcccagcctctgtccctgcgtccggaggcatgtagacccgcagctggtggggccgtgcatacccggggtcttgacttcgcctgcgatatctacatttgggcccctctggctggtacttgcggggtcctgctgctttcactcgtgatcactctttactgtaagcgcggtcggaagaagctgctgtacatctttaagcaacccttcatgaggcctgtgcagactactcaagaggaggacggctgttcatgccggttcccagaggaggaggaaggcggctgcgaactgcgcgtgaaattcagccgcagcgcagatgctccagcctaccagcaggggcagaaccagctctacaacgaactcaatcttggtcggagagaggagtacgacgtgctggacaagcggagaggacgggacccagaaatgggcgggaagccgcgcagaaagaatccccaagagggcctgtacaacgagctccaaaaggataagatggcagaagcctatagcgagattggtatgaaaggggaacgcagaagaggcaaaggccacgacggactgtaccagggactcagcaccgccaccaaggacacctatgacgctcttcacatgcaggccctgccgcctcgg

SEQ ID NO: 179 - protein, 5 aa, Artificial Sequence
  Description of Artificial Sequence: Synthetic peptide
  MOD_RES (1)..(1): G or S
  MOD_RES (3)..(3): W or R
  MOD_RES (5)..(5): S or N
XFXMX

SEQ ID NO: 180 - protein, 17 aa, Artificial Sequence
  Description of Artificial Sequence: Synthetic peptide
  MOD_RES (1)..(1): N or S
  MOD_RES (3)..(3): K or S
  MOD_RES (4)..(4): Q or S
  MOD_RES (5)..(5): D or S
  MOD_RES (6)..(6): G or S
  MOD_RES (8)..(8): E or Y
  MOD_RES (9)..(9): K or I
  MOD_RES (12)..(12): V or A
  MOD_RES (16)..(16): R or K
XIXXXXSXXYYXDSVXG

SEQ ID NO: 181 - protein, 9 aa, Artificial Sequence
  Description of Artificial Sequence: Synthetic peptide
  MOD_RES (1)..(1): A or W
  MOD_RES (3)..(3): D or S
XLXYYGMDV

SEQ ID NO: 182 - protein, 7 aa, Artificial Sequence
  Description of Artificial Sequence: Synthetic peptide
  MOD_RES (4)..(4): Y or F
TLSXRAS

SEQ ID NO: 183 - protein, 10 aa, Artificial Sequence
  Description of Artificial Sequence: Synthetic peptide
  MOD_RES (1)..(1): T or M
  MOD_RES (4)..(4): L or I
  MOD_RES (5)..(5): E or G
  MOD_RES (8)..(8): S or absent
XQRXXFPXIT

SEQ ID NO: 184 - protein, 7 aa, Artificial Sequence
  Description of Artificial Sequence: Synthetic peptide
  MOD_RES (6)..(6): G or S
GFTFSXF

SEQ ID NO: 185 - protein, 6 aa, Artificial Sequence
  Description of Artificial Sequence: Synthetic peptide
  MOD_RES (1)..(1): K or S
  MOD_RES (2)..(2): Q or S
  MOD_RES (3)..(3): D or S
  MOD_RES (4)..(4): G or S
  MOD_RES (6)..(6): E or Y
XXXXSX

SEQ ID NO: 186 - protein, 7 aa, Artificial Sequence
  Description of Artificial Sequence: Synthetic peptide
  MOD_RES (2)..(2): L or I
  MOD_RES (3)..(3): E or G
  MOD_RES (6)..(6): S or absent
RXXFPXI

SEQ ID NO: 187 - protein, 8 aa, Artificial Sequence
  Description of Artificial Sequence: Synthetic peptide
  MOD_RES (6)..(6): G or S
  MOD_RES (8)..(8): W or R
GFTFSXFX

SEQ ID NO: 188 - protein, 8 aa, Artificial Sequence
  Description of Artificial Sequence: Synthetic peptide
  MOD_RES (2)..(2): K or S
  MOD_RES (3)..(3): Q or S
  MOD_RES (4)..(4): D or S
  MOD_RES (5)..(5): G or S
  MOD_RES (7)..(7): E or Y
  MOD_RES (8)..(8): K or I
IXXXXSXX

SEQ ID NO: 189 - protein, 11 aa, Artificial Sequence
  Description of Artificial Sequence: Synthetic peptide
  MOD_RES (3)..(3): A or W
  MOD_RES (5)..(5): D or S
ARXLXYYGMDV

SEQ ID NO: 190-195 - skipped (6 entries)

SEQ ID NO: 196 - protein, 238 aa, Artificial Sequence
  Description of Artificial Sequence: Synthetic polypeptide
EVQLQQSGPGLVKPSQTLSLTCAISGDSMLSNSDTWNWIRQSPSRGLEWLGRTYHRSTWYDDYASSVRGRVSINVDTSKNQYSLQLNAVTPEDTGVYYCARVRLQDGNSWSDAFDVWGQGTMVTVSSQSALTQPASASGSPGQSVTISCTGTSSDVGGYNYVSWYQQHPGKAPKLMIYDVSNRPSGVSNRFSGSKSGNTASLTISGLQAEDEADYYCSSYTSSSTLYVFGTGTQLTVL

SEQ ID NO: 197-201 - skipped (5 entries)

SEQ ID NO: 202 - protein, 69 aa, Artificial Sequence
  Description of Artificial Sequence: Synthetic polypeptide
TTTPAPRPPTPAPTIASQPLSLRPEACRPAAGGAVHTRGLDFACDIYIWAPLAGTCGVLLLSLVITLYC

SEQ ID NO: 203-224 - skipped (22 entries)

SEQ ID NO: 225 - protein, 465 aa, Artificial Sequence
  Description of Artificial Sequence: Synthetic polypeptide
EIVMTQSPATLSLSPGERATLSCRASQDISKYLNWYQQKPGQAPRLLIYHTSRLHSGIPARFSGSGSGTDYTLTISSLQPEDFAVYFCQQGNTLPYTFGQGTKLEIKGGGGSGGGGSGGGGSQVQLQESGPGLVKPSETLSLTCTVSGVSLPDYGVSWIRQPPGKGLEWIGVIWGSETTYYQSSLKSRVTISKDNSKNQVSLKLSSVTAADTAVYYCAKHYYYGGSYAMDYWGQGTLVTVSSTTTPAPRPPTPAPTIASQPLSLRPEACRPAAGGAVHTRGLDFACDIYIWAPLAGTCGVLLLSLVITLYCKRGRKKLLYIFKQPFMRPVQTTQEEDGCSCRFPEEEEGGCELRVKFSRSADAPAYQQGQNQLYNELNLGRREEYDVLDKRRGRDPEMGGKPRRKNPQEGLYNELQKDKMAEAYSEIGMKGERRRGKGHDGLYQGLSTATKDTYDALHMQALPPR

SEQ ID NO: 226-249 - skipped (24 entries)

SEQ ID NO: 250 - protein, 120 aa, Artificial Sequence
  Description of Artificial Sequence: Synthetic polypeptide
QVQLQESGPGLVKPSETLSLTCTVSGVSLPDYGVSWIRQPPGKGLEWIGVIWGSETTYYQSSLKSRVTISKDNSKNQVSLKLSSVTAADTAVYYCAKHYYYGGSYAMDYWGQGTLVTVSS

SEQ ID NO: 251 - protein, 107 aa, Artificial Sequence
  Description of Artificial Sequence: Synthetic polypeptide
EIVMTQSPATLSLSPGERATLSCRASQDISKYLNWYQQKPGQAPRLLIYHTSRLHSGIPARFSGSGSGTDYTLTISSLQPEDFAVYFCQQGNTLPYTFGQGTKLEIK

SEQ ID NO: 252 - DNA, 63 bp, Artificial Sequence
  Description of Artificial Sequence: Synthetic oligonucleotide
atggccctccctgtcaccgctctgttgctgccgcttgctctgctgctccacgcagcgcgaccg

SEQ ID NO: 253 - DNA, 747 bp, Artificial Sequence
  Description of Artificial Sequence: Synthetic polynucleotide
caggtacaattgcaggagtctggaggcggtgtggtgcaacccggtcgcagcttgcgcctgagttgtgctgcgtctggatttacattttcatcttacggaatgcattgggtacgccaggcaccggggaaaggccttgaatgggtggctgtaatttcatacgatggttccaacaaatactatgctgactcagtcaagggtcgatttacaattagtcgggacaactccaagaacaccctttatcttcaaatgaattcccttagagcagaggatacggcggtctattactgtggtggcagtggttatgcacttcatgatgattactatggcttggatgtctgggggcaagggacgcttgtaactgtatcctctggtggtggtggtagtggtgggggaggctccggcggtggcggctctcaatctgctctgactcaaccagcaagcgtatcagggtcaccgggacagagtattaccataagttgcacggggacctctagcgatgtaggggggtataattatgtatcttggtatcaacaacaccccgggaaagcccctaaattgatgatctacgacgtgagcaatcgacctagtggcgtatcaaatcgcttctctggtagcaagagtgggaatacggcgtcccttactattagcggattgcaagcagaagatgaggccgattactactgcagctcctatactagctcttctacattgtacgtctttgggagcggaacaaaagtaacagtactc

SEQ ID NO: 254 - DNA, 207 bp, Artificial Sequence
  Description of Artificial Sequence: Synthetic polynucleotide
acaacaacacctgccccgagaccgcctacaccagccccgactattgccagccagcctctgagcctcaggcctgaggcctgtaggcccgcagcgggcggcgcagttcatacacggggcttggatttcgcttgtgatatttatatttgggctcctttggcggggacatgtggcgtgctgcttctgtcacttgttattacactgtactgt

SEQ ID NO: 255 - DNA, 126 bp, Artificial Sequence
  Description of Artificial Sequence: Synthetic polynucleotide
aaacgcgggcgaaaaaaattgctgtatatttttaagcagccatttatgaggcccgttcagacgacgcaggaggaggacggttgctcttgcaggttcccagaagaggaagaagggggctgtgaattg

SEQ ID NO: 256 - DNA, 336 bp, Artificial Sequence
  Description of Artificial Sequence: Synthetic polynucleotide
cgggttaaattttcaagatccgcagacgctccagcataccaacagggacaaaaccaactctataacgagctgaatcttggaagaagggaggaatatgatgtgctggataaacggcgcggtagagatccggagatgggcggaaaaccaaggcgaaaaaaccctcaggagggactctacaacgaactgcagaaagacaaaatggcggaggcttattccgaaataggcatgaagggcgagcggaggcgagggaaagggcacgacggactgtatcaaggcctctcaaccgcgactaaggatacgtacgacgccctgcacatgcaggccctgcctccgaga

SEQ ID NO: 257 - protein, 493 aa, Artificial Sequence
  Description of Artificial Sequence: Synthetic polypeptide
MALPVTALLLPLALLLHAARPQVQLQESGGGVVQPGRSLRLSCAASGFTFSSYGMHWVRQAPGKGLEWVAVISYDGSNKYYADSVKGRFTISRDNSKNTLYLQMNSLRAEDTAVYYCGGSGYALHDDYYGLDVWGQGTLVTVSSGGGGSGGGGSGGGGSQSALTQPASVSGSPGQSITISCTGTSSDVGGYNYVSWYQQHPGKAPKLMIYDVSNRPSGVSNRFSGSKSGNTASLTISGLQAEDEADYYCSSYTSSSTLYVFGSGTKVTVLTTTPAPRPPTPAPTIASQPLSLRPEACRPAAGGAVHTRGLDFACDIYIWAPLAGTCGVLLLSLVITLYCKRGRKKLLYIFKQPFMRPVQTTQEEDGCSCRFPEEEEGGCELRVKFSRSADAPAYQQGQNQLYNELNLGRREEYDVLDKRRGRDPEMGGKPRRKNPQEGLYNELQKDKMAEAYSEIGMKGERRRGKGHDGLYQGLSTATKDTYDALHMQALPPR

SEQ ID NO: 258 - DNA, 1479 bp, Artificial Sequence
  Description of Artificial Sequence: Synthetic polynucleotide
atggccctccctgtcaccgctctgttgctgccgcttgctctgctgctccacgcagcgcgaccgcaggtacaattgcaggagtctggaggcggtgtggtgcaacccggtcgcagcttgcgcctgagttgtgctgcgtctggatttacattttcatcttacggaatgcattgggtacgccaggcaccggggaaaggccttgaatgggtggctgtaatttcatacgatggttccaacaaatactatgctgactcagtcaagggtcgatttacaattagtcgggacaactccaagaacaccctttatcttcaaatgaattcccttagagcagaggatacggcggtctattactgtggtggcagtggttatgcacttcatgatgattactatggcttggatgtctgggggcaagggacgcttgtaactgtatcctctggtggtggtggtagtggtgggggaggctccggcggtggcggctctcaatctgctctgactcaaccagcaagcgtatcagggtcaccgggacagagtattaccataagttgcacggggacctctagcgatgtaggggggtataattatgtatcttggtatcaacaacaccccgggaaagcccctaaattgatgatctacgacgtgagcaatcgacctagtggcgtatcaaatcgcttctctggtagcaagagtgggaatacggcgtcccttactattagcggattgcaagcagaagatgaggccgattactactgcagctcctatactagctcttctacattgtacgtctttgggagcggaacaaaagtaacagtactcacaacaacacctgccccgagaccgcctacaccagccccgactattgccagccagcctctgagcctcaggcctgaggcctgtaggcccgcagcgggcggcgcagttcatacacggggcttggatttcgcttgtgatatttatatttgggctcctttggcggggacatgtggcgtgctgcttctgtcacttgttattacactgtactgtaaacgcgggcgaaaaaaattgctgtatatttttaagcagccatttatgaggcccgttcagacgacgcaggaggaggacggttgctcttgcaggttcccagaagaggaagaagggggctgtgaattgcgggttaaattttcaagatccgcagacgctccagcataccaacagggacaaaaccaactctataacgagctgaatcttggaagaagggaggaatatgatgtgctggataaacggcgcggtagagatccggagatgggcggaaaaccaaggcgaaaaaaccctcaggagggactctacaacgaactgcagaaagacaaaatggcggaggcttattccgaaataggcatgaagggcgagcggaggcgagggaaagggcacgacggactgtatcaaggcctctcaaccgcgactaaggatacgtacgacgccctgcacatgcaggccctgcctccgaga

SEQ ID NO: 259-299 - skipped (41 entries)

SEQ ID NO: 300 - protein, 9 aa, Artificial Sequence
  Description of Artificial Sequence: Synthetic peptide
QQGNTLPYT

SEQ ID NO: 301-308 - skipped (8 entries)

SEQ ID NO: 309 - protein, 284 aa, Artificial Sequence
  Description of Artificial Sequence: Synthetic polypeptide
NWVNVISDLKKIEDLIQSMHIDATLYTESDVHPSCKVTAMKCFLLELQVISLESGDASIHDTVENLIILANNSLSSNGNVTESGCKECEELEEKNIKEFLQSFVHIVQMFINTSITCPPPMSVEHADIWVKSYSLYSRERYICNSGFKRKAGTSSLTECVLNKATNVAHWTTPSLKCIRDPALVHQRPAPPSTVTTAGVTPQPESLSPSGKEPAASSPSSNNTAATTAAIVPGSQLMPSKSPSTGTTEISSHESSHGTPSQTTAKNWELTASASHQPPGVYPQG

SEQ ID NO: 310-330 - skipped (21 entries)

SEQ ID NO: 331 - protein, 120 aa, Artificial Sequence
  Description of Artificial Sequence: Synthetic polypeptide
QVQLQESGPGLVKPSETLSLTCTVSGVSLPDYGVSWIRQPPGKCLEWIGVIWGSETTYYQSSLKSRVTISKDNSKNQVSLKLSSVTAADTAVYYCAKHYYYGGSYAMDYWGQGTLVTVSS

SEQ ID NO: 332 - protein, 107 aa, Artificial Sequence
  Description of Artificial Sequence: Synthetic polypeptide
EIVMTQSPATLSLSPGERATLSCRASQDISKYLNWYQQKPGQAPRLLIYHTSRLHSGIPARFSGSGSGTDYTLTISSLQPEDFAVYFCQQGNTLPYTFGCGTKLEIK

SEQ ID NO: 333-348 - skipped (16 entries)

SEQ ID NO: 349 - protein, 486 aa, Artificial Sequence
  Description of Artificial Sequence: Synthetic polypeptide
MALPVTALLLPLALLLHAARPEIVMTQSPATLSLSPGERATLSCRASQDISKYLNWYQQKPGQAPRLLIYHTSRLHSGIPARFSGSGSGTDYTLTISSLQPEDFAVYFCQQGNTLPYTFGQGTKLEIKGGGGSGGGGSGGGGSQVQLQESGPGLVKPSETLSLTCTVSGVSLPDYGVSWIRQPPGKGLEWIGVIWGSETTYYQSSLKSRVTISKDNSKNQVSLKLSSVTAADTAVYYCAKHYYYGGSYAMDYWGQGTLVTVSSTTTPAPRPPTPAPTIASQPLSLRPEACRPAAGGAVHTRGLDFACDIYIWAPLAGTCGVLLLSLVITLYCKRGRKKLLYIFKQPFMRPVQTTQEEDGCSCRFPEEEEGGCELRVKFSRSADAPAYQQGQNQLYNELNLGRREEYDVLDKRRGRDPEMGGKPRRKNPQEGLYNELQKDKMAEAYSEIGMKGERRRGKGHDGLYQGLSTATKDTYDALHMQALPPR

SEQ ID NO: 350-353 - skipped (4 entries)

SEQ ID NO: 354 - DNA, 1461 bp, Artificial Sequence
  Description of Artificial Sequence: Synthetic polynucleotide
atggccctccctgtcaccgccctgctgcttccgctggctcttctgctccacgccgctcggcccgaaattgtgatgacccagtcacccgccactcttagcctttcacccggtgagcgcgcaaccctgtcttgcagagcctcccaagacatctcaaaataccttaattggtatcaacagaagcccggacaggctcctcgccttctgatctaccacaccagccggctccattctggaatccctgccaggttcagcggtagcggatctgggaccgactacaccctcactatcagctcactgcagccagaggacttcgctgtctatttctgtcagcaagggaacaccctgccctacacctttggacagggcaccaagctcgagattaaaggtggaggtggcagcggaggaggtgggtccggcggtggaggaagccaggtccaactccaagaaagcggaccgggtcttgtgaagccatcagaaactctttcactgacttgtactgtgagcggagtgtctctccccgattacggggtgtcttggatcagacagccaccggggaagggtctggaatggattggagtgatttggggctctgagactacttactaccaatcatccctcaagtcacgcgtcaccatctcaaaggacaactctaagaatcaggtgtcactgaaactgtcatctgtgaccgcagccgacaccgccgtgtactattgcgctaagcattactattatggcgggagctacgcaatggattactggggacagggtactctggtcaccgtgtccagcaccactaccccagcaccgaggccacccaccccggctcctaccatcgcctcccagcctctgtccctgcgtccggaggcatgtagacccgcagctggtggggccgtgcatacccggggtcttgacttcgcctgcgatatctacatttgggcccctctggctggtacttgcggggtcctgctgctttcactcgtgatcactctttactgtaagcgcggtcggaagaagctgctgtacatctttaagcaacccttcatgaggcctgtgcagactactcaagaggaggacggctgttcatgccggttcccagaggaggaggaaggcggctgcgaactgcgcgtgaaattcagccgcagcgcagatgctccagcctaccagcaggggcagaaccagctctacaacgaactcaatcttggtcggagagaggagtacgacgtgctggacaagcggagaggacgggacccagaaatgggcgggaagccgcgcagaaagaatccccaagagggcctgtacaacgagctccaaaaggataagatggcagaagcctatagcgagattggtatgaaaggggaacgcagaagaggcaaaggccacgacggactgtaccagggactcagcaccgccaccaaggacacctatgacgctcttcacatgcaggccctgccgcctcggtaa

SEQ ID NO: 355 - DNA, 1458 bp, Artificial Sequence
  Description of Artificial Sequence: Synthetic polynucleotide
atggccctccctgtcaccgccctgctgcttccgctggctcttctgctccacgccgctcggcccgaaattgtgatgacccagtcacccgccactcttagcctttcacccggtgagcgcgcaaccctgtcttgcagagcctcccaagacatctcaaaataccttaattggtatcaacagaagcccggacaggctcctcgccttctgatctaccacaccagccggctccattctggaatccctgccaggttcagcggtagcggatctgggaccgactacaccctcactatcagctcactgcagccagaggacttcgctgtctatttctgtcagcaagggaacaccctgccctacacctttggacagggcaccaagctcgagattaaaggtggaggtggcagcggaggaggtgggtccggcggtggaggaagccaggtccaactccaagaaagcggaccgggtcttgtgaagccatcagaaactctttcactgacttgtactgtgagcggagtgtctctccccgattacggggtgtcttggatcagacagccaccggggaagggtctggaatggattggagtgatttggggctctgagactacttactaccaatcatccctcaagtcacgcgtcaccatctcaaaggacaactctaagaatcaggtgtcactgaaactgtcatctgtgaccgcagccgacaccgccgtgtactattgcgctaagcattactattatggcgggagctacgcaatggattactggggacagggtactctggtcaccgtgtccagcaccactaccccagcaccgaggccacccaccccggctcctaccatcgcctcccagcctctgtccctgcgtccggaggcatgtagacccgcagctggtggggccgtgcatacccggggtcttgacttcgcctgcgatatctacatttgggcccctctggctggtacttgcggggtcctgctgctttcactcgtgatcactctttactgtaagcgcggtcggaagaagctgctgtacatctttaagcaacccttcatgaggcctgtgcagactactcaagaggaggacggctgttcatgccggttcccagaggaggaggaaggcggctgcgaactgcgcgtgaaattcagccgcagcgcagatgctccagcctaccagcaggggcagaaccagctctacaacgaactcaatcttggtcggagagaggagtacgacgtgctggacaagcggagaggacgggacccagaaatgggcgggaagccgcgcagaaagaatccccaagagggcctgtacaacgagctccaaaaggataagatggcagaagcctatagcgagattggtatgaaaggggaacgcagaagaggcaaaggccacgacggactgtaccagggactcagcaccgccaccaaggacacctatgacgctcttcacatgcaggccctgccgcctcgg

SEQ ID NO: 356 - DNA, 1398 bp, Artificial Sequence
  Description of Artificial Sequence: Synthetic polynucleotide
gaaattgtgatgacccagtcacccgccactcttagcctttcacccggtgagcgcgcaaccctgtcttgcagagcctcccaagacatctcaaaataccttaattggtatcaacagaagcccggacaggctcctcgccttctgatctaccacaccagccggctccattctggaatccctgccaggttcagcggtagcggatctgggaccgactacaccctcactatcagctcactgcagccagaggacttcgctgtctatttctgtcagcaagggaacaccctgccctacacctttggacagggcaccaagctcgagattaaaggtggaggtggcagcggaggaggtgggtccggcggtggaggaagccaggtccaactccaagaaagcggaccgggtcttgtgaagccatcagaaactctttcactgacttgtactgtgagcggagtgtctctccccgattacggggtgtcttggatcagacagccaccggggaagggtctggaatggattggagtgatttggggctctgagactacttactaccaatcatccctcaagtcacgcgtcaccatctcaaaggacaactctaagaatcaggtgtcactgaaactgtcatctgtgaccgcagccgacaccgccgtgtactattgcgctaagcattactattatggcgggagctacgcaatggattactggggacagggtactctggtcaccgtgtccagcaccactaccccagcaccgaggccacccaccccggctcctaccatcgcctcccagcctctgtccctgcgtccggaggcatgtagacccgcagctggtggggccgtgcatacccggggtcttgacttcgcctgcgatatctacatttgggcccctctggctggtacttgcggggtcctgctgctttcactcgtgatcactctttactgtaagcgcggtcggaagaagctgctgtacatctttaagcaacccttcatgaggcctgtgcagactactcaagaggaggacggctgttcatgccggttcccagaggaggaggaaggcggctgcgaactgcgcgtgaaattcagccgcagcgcagatgctccagcctaccagcaggggcagaaccagctctacaacgaactcaatcttggtcggagagaggagtacgacgtgctggacaagcggagaggacgggacccagaaatgggcgggaagccgcgcagaaagaatccccaagagggcctgtacaacgagctccaaaaggataagatggcagaagcctatagcgagattggtatgaaaggggaacgcagaagaggcaaaggccacgacggactgtaccagggactcagcaccgccaccaaggacacctatgacgctcttcacatgcaggccctgccgcctcggtaa

SEQ ID NO: 357 - DNA, 1467 bp, Artificial Sequence
  Description of Artificial Sequence: Synthetic polynucleotide
atgcttctcctggtgacaagccttctgctctgtgagttaccacacccagcattcctcctgatcccagacatccagatgacacagactacatcctccctgtctgcctctctgggagacagagtcaccatcagttgcagggcaagtcaggacattagtaaatatttaaattggtatcagcagaaaccagatggaactgttaaactcctgatctaccatacatcaagattacactcaggagtcccatcaaggttcagtggcagtgggtctggaacagattattctctcaccattagcaacctggagcaagaagatattgccacttacttttgccaacagggtaatacgcttccgtacacgttcggaggggggactaagttggaaataacaggctccacctctggatccggcaagcccggatctggcgagggatccaccaagggcgaggtgaaactgcaggagtcaggacctggcctggtggcgccctcacagagcctgtccgtcacatgcactgtctcaggggtctcattacccgactatggtgtaagctggattcgccagcctccacgaaagggtctggagtggctgggagtaatatggggtagtgaaaccacatactataattcagctctcaaatccagactgaccatcatcaaggacaactccaagagccaagttttcttaaaaatgaacagtctgcaaactgatgacacagccatttactactgtgccaaacattattactacggtggtagctatgctatggactactggggtcaaggaacctcagtcaccgtctcctcagcggccgcaattgaagttatgtatcctcctccttacctagacaatgagaagagcaatggaaccattatccatgtgaaagggaaacacctttgtccaagtcccctatttcccggaccttctaagcccttttgggtgctggtggtggttgggggagtcctggcttgctatagcttgctagtaacagtggcctttattattttctgggtgaggagtaagaggagcaggctcctgcacagtgactacatgaacatgactccccgccgccccgggcccacccgcaagcattaccagccctatgccccaccacgcgacttcgcagcctatcgctccagagtgaagttcagcaggagcgcagacgcccccgcgtaccagcagggccagaaccagctctataacgagctcaatctaggacgaagagaggagtacgatgttttggacaagagacgtggccgggaccctgagatggggggaaagccgagaaggaagaaccctcaggaaggcctgtacaatgaactgcagaaagataagatggcggaggcctacagtgagattgggatgaaaggcgagcgccggaggggcaaggggcacgatggcctttaccagggtctcagtacagccaccaaggacacctacgacgcccttcacatgcaggccctgccccctcgc

SEQ ID NO: 358 - protein, 489 aa, Artificial Sequence
  Description of Artificial Sequence: Synthetic polypeptide
MLLLVTSLLLCELPHPAFLLIPDIQMTQTTSSLSASLGDRVTISCRASQDISKYLNWYQQKPDGTVKLLIYHTSRLHSGVPSRFSGSGSGTDYSLTISNLEQEDIATYFCQQGNTLPYTFGGGTKLEITGSTSGSGKPGSGEGSTKGEVKLQESGPGLVAPSQSLSVTCTVSGVSLPDYGVSWIRQPPRKGLEWLGVIWGSETTYYNSALKSRLTIIKDNSKSQVFLKMNSLQTDDTAIYYCAKHYYYGGSYAMDYWGQGTSVTVSSAAAIEVMYPPPYLDNEKSNGTIIHVKGKHLCPSPLFPGPSKPFWVLVVVGGVLACYSLLVTVAFIIFWVRSKRSRLLHSDYMNMTPRRPGPTRKHYQPYAPPRDFAAYRSRVKFSRSADAPAYQQGQNQLYNELNLGRREEYDVLDKRRGRDPEMGGKPRRKNPQEGLYNELQKDKMAEAYSEIGMKGERRRGKGHDGLYQGLSTATKDTYDALHMQALPPR

SEQ ID NO: 359 - DNA, 801 bp, Artificial Sequence
  Description of Artificial Sequence: Synthetic polynucleotide
atgcttctcctggtgacaagccttctgctctgtgagttaccacacccagcattcctcctgatcccagacatccagatgacacagactacatcctccctgtctgcctctctgggagacagagtcaccatcagttgcagggcaagtcaggacattagtaaatatttaaattggtatcagcagaaaccagatggaactgttaaactcctgatctaccatacatcaagattacactcaggagtcccatcaaggttcagtggcagtgggtctggaacagattattctctcaccattagcaacctggagcaagaagatattgccacttacttttgccaacagggtaatacgcttccgtacacgttcggaggggggactaagttggaaataacaggctccacctctggatccggcaagcccggatctggcgagggatccaccaagggcgaggtgaaactgcaggagtcaggacctggcctggtggcgccctcacagagcctgtccgtcacatgcactgtctcaggggtctcattacccgactatggtgtaagctggattcgccagcctccacgaaagggtctggagtggctgggagtaatatggggtagtgaaaccacatactataattcagctctcaaatccagactgaccatcatcaaggacaactccaagagccaagttttcttaaaaatgaacagtctgcaaactgatgacacagccatttactactgtgccaaacattattactacggtggtagctatgctatggactactggggtcaaggaacctcagtcaccgtctcctca

SEQ ID NO: 360 - protein, 266 aa, Artificial Sequence
  Description of Artificial Sequence: Synthetic polypeptide
MLLLVTSLLLCELPHPAFLLIPDIQMTQTTSSLSASLGDRVTISCRASQDISKYLNWYQQKPDGTVKLLIYHTSRLHSGVPSRFSGSGSGTDYSLTISNLEQEDIATYFCQQGNTLPYTFGGGTKLEITGSTSGSGKPGSGEGSTKGEVKLQESGPGLVAPSQSLSVTCTVSGVSLPDYGVSWIRQPPRKGLEWLGVIWGSETTYYNSALKSRLTIIKDNSKSQVFLKMNSLQTDDTAIYYCAKHYYYGGSYAMDYWGQGTSVTVS

SEQ ID NO: 361 - DNA, 1401 bp, Artificial Sequence
  Description of Artificial Sequence: Synthetic polynucleotide
gacatccagatgacacagactacatcctccctgtctgcctctctgggagacagagtcaccatcagttgcagggcaagtcaggacattagtaaatatttaaattggtatcagcagaaaccagatggaactgttaaactcctgatctaccatacatcaagattacactcaggagtcccatcaaggttcagtggcagtgggtctggaacagattattctctcaccattagcaacctggagcaagaagatattgccacttacttttgccaacagggtaatacgcttccgtacacgttcggaggggggactaagttggaaataacaggctccacctctggatccggcaagcccggatctggcgagggatccaccaagggcgaggtgaaactgcaggagtcaggacctggcctggtggcgccctcacagagcctgtccgtcacatgcactgtctcaggggtctcattacccgactatggtgtaagctggattcgccagcctccacgaaagggtctggagtggctgggagtaatatggggtagtgaaaccacatactataattcagctctcaaatccagactgaccatcatcaaggacaactccaagagccaagttttcttaaaaatgaacagtctgcaaactgatgacacagccatttactactgtgccaaacattattactacggtggtagctatgctatggactactggggtcaaggaacctcagtcaccgtctcctcagcggccgcaattgaagttatgtatcctcctccttacctagacaatgagaagagcaatggaaccattatccatgtgaaagggaaacacctttgtccaagtcccctatttcccggaccttctaagcccttttgggtgctggtggtggttgggggagtcctggcttgctatagcttgctagtaacagtggcctttattattttctgggtgaggagtaagaggagcaggctcctgcacagtgactacatgaacatgactccccgccgccccgggcccacccgcaagcattaccagccctatgccccaccacgcgacttcgcagcctatcgctccagagtgaagttcagcaggagcgcagacgcccccgcgtaccagcagggccagaaccagctctataacgagctcaatctaggacgaagagaggagtacgatgttttggacaagagacgtggccgggaccctgagatggggggaaagccgagaaggaagaaccctcaggaaggcctgtacaatgaactgcagaaagataagatggcggaggcctacagtgagattgggatgaaaggcgagcgccggaggggcaaggggcacgatggcctttaccagggtctcagtacagccaccaaggacacctacgacgcccttcacatgcaggccctgccccctcgc

SEQ ID NO: 362 - protein, 467 aa, Artificial Sequence
  Description of Artificial Sequence: Synthetic polypeptide
DIQMTQTTSSLSASLGDRVTISCRASQDISKYLNWYQQKPDGTVKLLIYHTSRLHSGVPSRFSGSGSGTDYSLTISNLEQEDIATYFCQQGNTLPYTFGGGTKLEITGSTSGSGKPGSGEGSTKGEVKLQESGPGLVAPSQSLSVTCTVSGVSLPDYGVSWIRQPPRKGLEWLGVIWGSETTYYNSALKSRLTIIKDNSKSQVFLKMNSLQTDDTAIYYCAKHYYYGGSYAMDYWGQGTSVTVSSAAAIEVMYPPPYLDNEKSNGTIIHVKGKHLCPSPLFPGPSKPFWVLVVVGGVLACYSLLVTVAFIIFWVRSKRSRLLHSDYMNMTPRRPGPTRKHYQPYAPPRDFAAYRSRVKFSRSADAPAYQQGQNQLYNELNLGRREEYDVLDKRRGRDPEMGGKPRRKNPQEGLYNELQKDKMAEAYSEIGMKGERRRGKGHDGLYQGLSTATKDTYDALHMQALPPR

SEQ ID NO: 363 - DNA, 735 bp, Artificial Sequence
  Description of Artificial Sequence: Synthetic polynucleotide
gacatccagatgacacagactacatcctccctgtctgcctctctgggagacagagtcaccatcagttgcagggcaagtcaggacattagtaaatatttaaattggtatcagcagaaaccagatggaactgttaaactcctgatctaccatacatcaagattacactcaggagtcccatcaaggttcagtggcagtgggtctggaacagattattctctcaccattagcaacctggagcaagaagatattgccacttacttttgccaacagggtaatacgcttccgtacacgttcggaggggggactaagttggaaataacaggctccacctctggatccggcaagcccggatctggcgagggatccaccaagggcgaggtgaaactgcaggagtcaggacctggcctggtggcgccctcacagagcctgtccgtcacatgcactgtctcaggggtctcattacccgactatggtgtaagctggattcgccagcctccacgaaagggtctggagtggctgggagtaatatggggtagtgaaaccacatactataattcagctctcaaatccagactgaccatcatcaaggacaactccaagagccaagttttcttaaaaatgaacagtctgcaaactgatgacacagccatttactactgtgccaaacattattactacggtggtagctatgctatggactactggggtcaaggaacctcagtcaccgtctcctca

SEQ ID NO: 364 - protein, 245 aa, Artificial Sequence
  Description of Artificial Sequence: Synthetic polypeptide
DIQMTQTTSSLSASLGDRVTISCRASQDISKYLNWYQQKPDGTVKLLIYHTSRLHSGVPSRFSGSGSGTDYSLTISNLEQEDIATYFCQQGNTLPYTFGGGTKLEITGSTSGSGKPGSGEGSTKGEVKLQESGPGLVAPSQSLSVTCTVSGVSLPDYGVSWIRQPPRKGLEWLGVIWGSETTYYNSALKSRLTIIKDNSKSQVFLKMNSLQTDDTAIYYCAKHYYYGGSYAMDYWGQGTSVTVSS

SEQ ID NO: 365 - protein, 503 aa, Artificial Sequence
  Description of Artificial Sequence: Synthetic polypeptide
MLLLVTSLLLCELPHPAFLLIPDIQMTQTTSSLSASLGDRVTISCRASQDISKYLNWYQQKPDGTVKLLIYHTSRLHSGVPSRFSGSGSGTDYSLTISNLEQEDIATYFCQQGNTLPYTFGGGTKLEITGSTSGSGKPGSGEGSTKGEVKLQESGPGLVAPSQSLSVTCTVSGVSLPDYGVSWIRQPPRKGLEWLGVIWGSETTYYNSALKSRLTIIKDNSKSQVFLKMNSLQTDDTAIYYCAKHYYYGGSYAMDYWGQGTSVTVSSFVPVFLPAKPTTTPAPRPPTPAPTIASQPLSLRPEACRPAAGGAVHTRGLDFACDIYIWAPLAGTCGVLLLSLVITLYCNHRNRSKRSRLLHSDYMNMTPRRPGPTRKHYQPYAPPRDFAAYRSRVKFSRSADAPAYQQGQNQLYNELNLGRREEYDVLDKRRGRDPEMGGKPRRKNPQEGLYNELQKDKMAEAYSEIGMKGERRRGKGHDGLYQGLSTATKDTYDALHMQALPPR

SEQ ID NO: 366 - DNA, 1467 bp, Artificial Sequence
  Description of Artificial Sequence: Synthetic polynucleotide
atgcttctcctggtgacaagccttctgctctgtgagttaccacacccagcattcctcctgatcccagacatccagatgacacagactacatcctccctgtctgcctctctgggagacagagtcaccatcagttgcagggcaagtcaggacattagtaaatatttaaattggtatcagcagaaaccagatggaactgttaaactcctgatctaccatacatcaagattacactcaggagtcccatcaaggttcagtggcagtgggtctggaacagattattctctcaccattagcaacctggagcaagaagatattgccacttacttttgccaacagggtaatacgcttccgtacacgttcggaggggggactaagttggaaataacaggctccacctctggatccggcaagcccggatctggcgagggatccaccaagggcgaggtgaaactgcaggagtcaggacctggcctggtggcgccctcacagagcctgtccgtcacatgcactgtctcaggagggtctggaggtctcattacccgactatggtgtaagctggattcgccagcctccacgaagtggctgggagtaatatggggtagtgaaaccacatactataattcagctctcaaatccagactgaccatcatcaaggacaactccaagagccaagttttcttaaaaatgaacagtctgcaaactgatgacacagccatttactactgtgccaaacattattactacggtggtagctatgctatggactactggggtcaaggaacctcagtcaccgtctcctcagcggccgcaattgaagttatgtatcctcctccttacctagacaatgagaagagcaatggaaccattatccatgtgaaagggaaacacctttgtccaagtcccctatttcccggaccttctaagcccttttgggtgctggtggtggttgggggagtcctggcttgctatagcttgctagtaacagtggcctttattattttctgggtgaggagtaagaggagcaggctcctgcacagtgactacatgaacatgactccccgccgccccgggcccacccgcaagcattaccagccctatgccccaccacgcgacttcgcagcctatcgctccagagtgaagttcagcaggagcgcagacgcccccgcgtaccagcagggccagaaccagctctataacgagctcaatctaggacgaagagaggagtacgatgttttggacaagagacgtggccgggaccctgagatggggggaaagccgagaaggaagaaccctcaggaaggcctgtacaatgaactgcagaaagataagatggcggaggcctacagtgagattgggatgaaaggcgagcgccggaggggcaaggggcacgatggcctttaccagggtctcagtacagccaccaaggacacctacgacgcccttcacatgcaggccctgccccctcgc

SEQ ID NO: 367 - DNA, 1383 bp, Artificial Sequence
  Description of Artificial Sequence: Synthetic polynucleotide
atgctgctgctggtgaccagcctgctgctgtgcgagctgccccaccccgcctttctgctgatccccgacatccagatgacccagaccacctccagcctgagcgccagcctgggcgaccgggtgaccatcagctgccgggccagccaggacatcagcaagtacctgaactggtatcagcagaagcccgacggcaccgtcaagctgctgatctaccacaccagccggctgcacagcggcgtgcccagccggtttagcggcagcggctccggcaccgactacagcctgaccatctccaacctggaacaggaagatatcgccacctacttttgccagcagggcaacacactgccctacacctttggcggcggaacaaagctggaaatcaccggcagcacctccggcagcggcaagcctggcagcggcgagggcagcaccaagggcgaggtgaagctgcaggaaagcggccctggcctggtggcccccagccagagcctgagcgtgacctgcaccgtgagcggcgtgagcctgcccgactacggcgtgagctggatccggcagccccccaggaagggcctggaatggctgggcgtgatctggggcagcgagaccacctactacaacagcgccctgaagagccggctgaccatcatcaaggacaacagcaagagccaggtgttcctgaagatgaacagcctgcagaccgacgacaccgccatctactactgcgccaagcactactactacggcggcagctacgccatggactactggggccagggcaccagcgtgaccgtgagcagcgaatctaagtacggaccgccctgccccccttgccctatgttctgggtgctggtggtggtcggaggcgtgctggcctgctacagcctgctggtcaccgtggccttcatcatcttttgggtgaaacggggcagaaagaaactcctgtatatattcaaacaaccatttatgagaccagtacaaactactcaagaggaagatggctgtagctgccgatttccagaagaagaagaaggaggatgtgaactgcgggtgaagttcagcagaagcgccgacgcccctgcctaccagcagggccagaatcagctgtacaacgagctgaacctgggcagaagggaagagtacgacgtcctggataagcggagaggccgggaccctgagatgggcggcaagcctcggcggaagaacccccaggaaggcctgtataacgaactgcagaaagacaagatggccgaggcctacagcgagatcggcatgaagggcgagcggaggcggggcaagggccacgacggcctgtatcagggcctgtccaccgccaccaaggatacctacgacgccctgcacatgcaggccctgcccccaagg

SEQ ID NO: 368 - protein, 461 aa, Artificial Sequence
  Description of Artificial Sequence: Synthetic polypeptide
MLLLVTSLLLCELPHPAFLLIPDIQMTQTTSSLSASLGDRVTISCRASQDISKYLNWYQQKPDGTVKLLIYHTSRLHSGVPSRFSGSGSGTDYSLTISNLEQEDIATYFCQQGNTLPYTFGGGTKLEITGSTSGSGKPGSGEGSTKGEVKLQESGPGLVAPSQSLSVTCTVSGVSLPDYGVSWIRQPPRKGLEWLGVIWGSETTYYNSALKSRLTIIKDNSKSQVFLKMNSLQTDDTAIYYCAKHYYYGGSYAMDYWGQGTSVTVSSESKYGPPCPPCPMFWVLVVVGGVLACYSLLVTVAFIIFWVKRGRKKLLYIFKQPFMRPVQTTQEEDGCSCRFPEEEEGGCELRVKFSRSADAPAYQQGQNQLYNELNLGRREEYDVLDKRRGRDPEMGGKPRRKNPQEGLYNELQKDKMAEAYSEIGMKGERRRGKGHDGLYQGLSTATKDTYDALHMQALPPR

SEQ ID NO: 369 - DNA, 801 bp, Artificial Sequence
  Description of Artificial Sequence: Synthetic polynucleotide
atgctgctgctggtgaccagcctgctgctgtgcgagctgccccaccccgcctttctgctgatccccgacatccagatgacccagaccacctccagcctgagcgccagcctgggcgaccgggtgaccatcagctgccgggccagccaggacatcagcaagtacctgaactggtatcagcagaagcccgacggcaccgtcaagctgctgatctaccacaccagccggctgcacagcggcgtgcccagccggtttagcggcagcggctccggcaccgactacagcctgaccatctccaacctggaacaggaagatatcgccacctacttttgccagcagggcaacacactgccctacacctttggcggcggaacaaagctggaaatcaccggcagcacctccggcagcggcaagcctggcagcggcgagggcagcaccaagggcgaggtgaagctgcaggaaagcggccctggcctggtggcccccagccagagcctgagcgtgacctgcaccgtgagcggcgtgagcctgcccgactacggcgtgagctggatccggcagccccccaggaagggcctggaatggctgggcgtgatctggggcagcgagaccacctactacaacagcgccctgaagagccggctgaccatcatcaaggacaacagcaagagccaggtgttcctgaagatgaacagcctgcagaccgacgacaccgccatctactactgcgccaagcactactactacggcggcagctacgccatggactactggggccagggcaccagcgtgaccgtgagcagc

SEQ ID NO: 370 - protein, 267 aa, Artificial Sequence
  Description of Artificial Sequence: Synthetic polypeptide
MLLLVTSLLLCELPHPAFLLIPDIQMTQTTSSLSASLGDRVTISCRASQDISKYLNWYQQKPDGTVKLLIYHTSRLHSGVPSRFSGSGSGTDYSLTISNLEQEDIATYFCQQGNTLPYTFGGGTKLEITGSTSGSGKPGSGEGSTKGEVKLQESGPGLVAPSQSLSVTCTVSGVSLPDYGVSWIRQPPRKGLEWLGVIWGSETTYYNSALKSRLTIIKDNSKSQVFLKMNSLQTDDTAIYYCAKHYYYGGSYAMDYWGQGTSVTVSS

SEQ ID NO: 371 - DNA, 1317 bp, Artificial Sequence
  Description of Artificial Sequence: Synthetic polynucleotide
gacatccagatgacccagaccacctccagcctgagcgccagcctgggcgaccgggtgaccatcagctgccgggccagccaggacatcagcaagtacctgaactggtatcagcagaagcccgacggcaccgtcaagctgctgatctaccacaccagccggctgcacagcggcgtgcccagccggtttagcggcagcggctccggcaccgactacagcctgaccatctccaacctggaacaggaagatatcgccacctacttttgccagcagggcaacacactgccctacacctttggcggcggaacaaagctggaaatcaccggcagcacctccggcagcggcaagcctggcagcggcgagggcagcaccaagggcgaggtgaagctgcaggaaagcggccctggcctggtggcccccagccagagcctgagcgtgacctgcaccgtgagcggcgtgagcctgcccgactacggcgtgagctggatccggcagccccccaggaagggcctggaatggctgggcgtgatctggggcagcgagaccacctactacaacagcgccctgaagagccggctgaccatcatcaaggacaacagcaagagccaggtgttcctgaagatgaacagcctgcagaccgacgacaccgccatctactactgcgccaagcactactactacggcggcagctacgccatggactactggggccagggcaccagcgtgaccgtgagcagcgaatctaagtacggaccgccctgccccccttgccctatgttctgggtgctggtggtggtcggaggcgtgctggcctgctacagcctgctggtcaccgtggccttcatcatcttttgggtgaaacggggcagaaagaaactcctgtatatattcaaacaaccatttatgagaccagtacaaactactcaagaggaagatggctgtagctgccgatttccagaagaagaagaaggaggatgtgaactgcgggtgaagttcagcagaagcgccgacgcccctgcctaccagcagggccagaatcagctgtacaacgagctgaacctgggcagaagggaagagtacgacgtcctggataagcggagaggccgggaccctgagatgggcggcaagcctcggcggaagaacccccaggaaggcctgtataacgaactgcagaaagacaagatggccgaggcctacagcgagatcggcatgaagggcgagcggaggcggggcaagggccacgacggcctgtatcagggcctgtccaccgccaccaaggatacctacgacgccctgcacatgcaggccctgcccccaagg

SEQ ID NO: 372 - protein, 439 aa, Artificial Sequence
  Description of Artificial Sequence: Synthetic polypeptide
DIQMTQTTSSLSASLGDRVTISCRASQDISKYLNWYQQKPDGTVKLLIYHTSRLHSGVPSRFSGSGSGTDYSLTISNLEQEDIATYFCQQGNTLPYTFGGGTKLEITGSTSGSGKPGSGEGSTKGEVKLQESGPGLVAPSQSLSVTCTVSGVSLPDYGVSWIRQPPRKGLEWLGVIWGSETTYYNSALKSRLTIIKDNSKSQVFLKMNSLQTDDTAIYYCAKHYYYGGSYAMDYWGQGTSVTVSSESKYGPPCPPCPMFWVLVVVGGVLACYSLLVTVAFIIFWVKRGRKKLLYIFKQPFMRPVQTTQEEDGCSCRFPEEEEGGCELRVKFSRSADAPAYQQGQNQLYNELNLGRREEYDVLDKRRGRDPEMGGKPRRKNPQEGLYNELQKDKMAEAYSEIGMKGERRRGKGHDGLYQGLSTATKDTYDALHMQALPPR

SEQ ID NO: 373 - DNA, 735 bp, Artificial Sequence
  Description of Artificial Sequence: Synthetic polynucleotide
gacatccagatgacccagaccacctccagcctgagcgccagcctgggcgaccgggtgaccatcagctgccgggccagccaggacatcagcaagtacctgaactggtatcagcagaagcccgacggcaccgtcaagctgctgatctaccacaccagccggctgcacagcggcgtgcccagccggtttagcggcagcggctccggcaccgactacagcctgaccatctccaacctggaacaggaagatatcgccacctacttttgccagcagggcaacacactgccctacacctttggcggcggaacaaagctggaaatcaccggcagcacctccggcagcggcaagcctggcagcggcgagggcagcaccaagggcgaggtgaagctgcaggaaagcggccctggcctggtggcccccagccagagcctgagcgtgacctgcaccgtgagcggcgtgagcctgcccgactacggcgtgagctggatccggcagccccccaggaagggcctggaatggctgggcgtgatctggggcagcgagaccacctactacaacagcgccctgaagagccggctgaccatcatcaaggacaacagcaagagccaggtgttcctgaagatgaacagcctgcagaccgacgacaccgccatctactactgcgccaagcactactactacggcggcagctacgccatggactactggggccagggcaccagcgtgaccgtgagcagc

SEQ ID NO: 374 - protein, 245 aa, Artificial Sequence; identical to SEQ ID NO: 364
  Description of Artificial Sequence: Synthetic polypeptide

SEQ ID NO: 375 - protein, 493 aa, Artificial Sequence
  Description of Artificial Sequence: Synthetic polypeptide
MALPVTALLLPLALLLHAARPDIVLTQSPPSLAMSLGKRATISCRASESVTILGSHLIHWYQQKPGQPPTLLIQLASNVQTGVPARFSGSGSRTDFTLTIDPVEEDDVAVYYCLQSRTIPRTFGGGTKLEIKGSTSGSGKPGSGEGSTKGQIQLVQSGPELKKPGETVKISCKASGYTFTDYSINWVKRAPGKGLKWMGWINTETREPAYAYDFRGRFAFSLETSASTAYLQINNLKYEDTATYFCALDYSYAMDYWGQGTSVTVSSAAATTTPAPRPPTPAPTIASQPLSLRPEACRPAAGGAVHTRGLDFACDIYIWAPLAGTCGVLLLSLVITLYCKRGRKKLLYIFKQPFMRPVQTTQEEDGCSCRFPEEEEGGCELRVKFSRSADAPAYQQGQNQLYNELNLGRREEYDVLDKRRGRDPEMGGKPRRKNPQEGLYNELQKDKMAEAYSEIGMKGERRRGKGHDGLYQGLSTATKDTYDALHMQALPPR

SEQ ID NO: 376 - DNA, 1485 bp, Artificial Sequence
  Description of Artificial Sequence: Synthetic polynucleotide
atggcactccccgtcaccgcccttctcttgcccctcgccctgctgctgcatgctgccaggcccgacattgtgctcactcagtcacctcccagcctggccatgagcctgggaaaaagggccaccatctcctgtagagccagtgagtccgtcacaatcttggggagccatcttattcactggtatcagcagaagcccgggcagcctccaacccttcttattcagctcgcgtcaaacgtccagacgggtgtacctgccagattttctggtagcgggtcccgcactgattttacactgaccatagatccagtggaagaagacgatgtggccgtgtattattgtctgcagagcagaacgattcctcgcacatttggtgggggtactaagctggagattaagggaagcacgtccggctcagggaagccgggctccggcgagggaagcacgaaggggcaaattcagctggtccagagcggacctgagctgaaaaaacccggcgagactgttaagatcagttgtaaagcatctggctataccttcaccgactacagcataaattgggtgaaacgggcccctggaaagggcctcaaatggatgggttggatcaataccgaaactagggagcctgcttatgcatatgacttccgcgggagattcgccttttcactcgagacatctgcctctactgcttacctccaaataaacaacctcaagtatgaagatacagccacttacttttgcgccctcgactatagttacgccatggactactggggacagggaacctccgttaccgtcagttccgcggccgcaaccacaacacctgctccaaggccccccacacccgctccaactatagccagccaaccattgagcctcagacctgaagcttgcaggcccgcagcaggaggcgccgtccatacgcgaggcctggacttcgcgtgtgatatttatatttgggcccctttggccggaacatgtggggtgttgcttctctcccttgtgatcactctgtattgtaagcgcgggagaaagaagctcctgtacatcttcaagcagccttttatgcgacctgtgcaaaccactcaggaagaagatgggtgttcatgccgcttccccgaggaggaagaaggagggtgtgaactgagggtgaaattttctagaagcgccgatgctcccgcatatcagcagggtcagaatcagctctacaatgaattgaatctcggcaggcgagaagagtacgatgttctggacaagagacggggcagggatcccgagatggggggaaagccccggagaaaaaatcctcaggaggggttgtacaatgagctgcagaaggacaagatggctgaagcctatagcgagatcggaatgaaaggcgaaagacgcagaggcaaggggcatgacggtctgtaccagggtctctctacagccaccaaggacacttatgatgcgttgcatatgcaagccttgccaccccgctaatga

SEQ ID NO: 377 - protein, 119 aa, Artificial Sequence
  Description of Artificial Sequence: Synthetic polypeptide
QVKLEESGGGLVQAGRSLRLSCAASEHTFSSHVMGWFRQAPGKERESVAVIGWRDISTSYADSVKGRFTISRDNAKKTLYLQMNSLKPEDTAVYYCAARRIDAADFDSWGQGTQVTVSS

SEQ ID NO: 378 - protein, 5 aa, Artificial Sequence
  Description of Artificial Sequence: Synthetic peptide
SHVMG

SEQ ID NO: 379 - protein, 16 aa, Artificial Sequence
  Description of Artificial Sequence: Synthetic peptide
VIGWRDISTSYADSVK

SEQ ID NO: 380 - protein, 11 aa, Artificial Sequence
  Description of Artificial Sequence: Synthetic peptide
ARRIDAADFDS

SEQ ID NO: 381 - protein, 118 aa, Artificial Sequence
  Description of Artificial Sequence: Synthetic polypeptide
EVQLVESGGGLVQAGGSLRLSCAASGRTFTMGWFRQAPGKEREFVAAISLSPTLAYYAESVKGRFTISRDNAKNTVVLQMNSLKPEDTALYYCAADRKSVMSIRPDYWGQGTQVTVSS

SEQ ID NO: 382 - protein, 5 aa, Artificial Sequence
  Description of Artificial Sequence: Synthetic peptide
TFTMG

SEQ ID NO: 383 - protein, 16 aa, Artificial Sequence
  Description of Artificial Sequence: Synthetic peptide
AISLSPTLAYYAESVK

SEQ ID NO: 384 - protein, 13 aa, Artificial Sequence
  Description of Artificial Sequence: Synthetic peptide
ADRKSVMSIRPDY

SEQ ID NO: 385 - DNA, 1404 bp, Artificial Sequence
  Description of Artificial Sequence: Synthetic polynucleotide
caggtcaaactggaagaatctggcggaggcctggtgcaggcaggacggagcctgcgcctgagctgcgcagcatccgagcacaccttcagctcccacgtgatgggctggtttcggcaggccccaggcaaggagagagagagcgtggccgtgatcggctggagggacatctccacatcttacgccgattccgtgaagggccggttcaccatcagccgggacaacgccaagaagacactgtatctgcagatgaacagcctgaagcccgaggacaccgccgtgtactattgcgcagcaaggagaatcgacgcagcagactttgattcctggggccagggcacccaggtgacagtgtctagcggaggaggaggatctgaggtgcagctggtggagagcggaggcggcctggtgcaggccggaggctctctgaggctgagctgtgcagcatccggaagaaccttcacaatgggctggtttaggcaggcaccaggaaaggagagggagttcgtggcagcaatcagcctgtcccctaccctggcctactatgccgagagcgtgaagggcaggtttaccatctcccgcgataacgccaagaatacagtggtgctgcagatgaactccctgaaacctgaggacacagccctgtactattgtgccgccgatcggaagagcgtgatgagcattagaccagactattgggggcagggaacacaggtgaccgtgagcagcactagtaccacgacgccagcgccgcgaccaccaacaccggcgcccaccatcgcgtcgcagcccctgtccctgcgcccagaggcgtgccggccagcggcggggggcgcagtgcacacgagggggctggacttcgcctgtgatatctacatctgggcgcccttggccgggacttgtggggtccttctcctgtcactggttatcaccctttactgcaaacggggcagaaagaaactcctgtatatattcaaacaaccatttatgagaccagtacaaactactcaagaggaagatggctgtagctgccgatttccagaagaagaagaaggaggatgtgaactgagagtgaagttcagcaggagcgcagacgcccccgcgtaccagcagggccagaaccagctctataacgagctcaatctaggacgaagagaggagtacgatgttttggacaagagacgtggccgggaccctgagatggggggaaagccgagaaggaagaaccctcaggaaggcctgtacaatgaactgcagaaagataagatggcggaggcctacagtgagattgggatgaaaggcgagcgccggaggggcaaggggcacgatggcctttaccagggtctcagtacagccaccaaggacacctacgacgcccttcacatgcaggccctgccccctcgctaa

SEQ ID NO: 386 - protein, 467 aa, Artificial Sequence
  Description of Artificial Sequence: Synthetic polypeptide
QVKLEESGGGLVQAGRSLRLSCAASEHTFSSHVMGWFRQAPGKERESVAVIGWRDISTSYADSVKGRFTISRDNAKKTLYLQMNSLKPEDTAVYYCAARRIDAADFDSWGQGTQVTVSSGGGGSEVQLVESGGGLVQAGGSLRLSCAASGRTFTMGWFRQAPGKEREFVAAISLSPTLAYYAESVKGRFTISRDNAKNTVVLQMNSLKPEDTALYYCAADRKSVMSIRPDYWGQGTQVTVSSTSTTTPAPRPPTPAPTIASQPLSLRPEACRPAAGGAVHTRGLDFACDIYIWAPLAGTCGVLLLSLVITLYCKRGRKKLLYIFKQPFMRPVQTTQEEDGCSCRFPEEEEGGCELRVKFSRSADAPAYQQGQNQLYNELNLGRREEYDVLDKRRGRDPEMGGKPRRKNPQEGLYNELQKDKMAEAYSEIGMKGERRRGKGHDGLYQGLSTATKDTYDALHMQALPPR

SEQ ID NO: 387 - protein, 488 aa, Artificial Sequence
  Description of Artificial Sequence: Synthetic polypeptide
MGTSLLCWMALCLLGADHADAQVQLQQSGPELVKPGASVKISCKASGYAFSSSWMNWVKQRPGKGLEWIGRIYPGDEDTNYSGKFKDKATLTADKSSTTAYMQLSSLTSEDSAVYFCARSLLYGDYLDYWGQGTTLTVSSGGGGSGGGGSGGGGSQIVLTQSPAIMSASPGEKVTMTCSASSSVSYMHWYQQKSGTSPKRWIYDTSKLASGVPDRFSGSGSGTSYFLTINNMEAEDAATYYCQQWNINPLTFGAGTKLELKRSDPTTTPAPRPPTPAPTIASQPLSLRPEACRPAAGGAVHTRGLDFACDIYIWAPLAGTCGVLLLSLVITLYCKRGRKKLLYIFKQPFMRPVQTTQEEDGCSCRFPEEEEGGCELRVKFSRSADAPAYQQGQNQLYNELNLGRREEYDVLDKRRGRDPEMGGKPRRKNPQEGLYNELQKDKMAEAYSEIGMKGERRRGKGHDGLYQGLSTATKDTYDALHMQALPPR

SEQ ID NO: 388 - DNA, 1467 bp, Artificial Sequence
  Description of Artificial Sequence: Synthetic polynucleotide
atgggcaccagcctgctgtgctggatggccctgtgcctgctgggagccgaccacgccgacgcccaggtgcagctgcagcagagcggacccgagctggtgaagcccggagccagcgtgaagatcagctgcaaggccagcggctacgccttcagcagcagctggatgaactgggtgaagcagcggcctggcaagggcctggagtggatcggccggatctaccccggcgacgaggacaccaactacagcggcaagttcaaggacaaggccaccctgaccgccgacaagagcagcaccaccgcctacatgcagctgagcagcctgaccagcgaggacagcgccgtgtacttctgcgcccggagcctgctgtacggcgactacctggactactggggccagggcaccaccctgaccgtgagctctggcggtggcggctctggcggaggtggctctggcggaggcggcagccagatcgtgctgacccagagccctgccatcatgagcgccagccctggcgagaaggtgaccatgacctgcagcgccagcagcagcgtgagctacatgcactggtaccagcagaagagcggcaccagccctaagcggtggatctacgacaccagcaagctggccagcggcgtgcccgaccgcttcagcggcagcggcagcggcaccagctacttcctgaccatcaacaacatggaggccgaggacgccgccacctactactgccagcagtggaacatcaatcctctgaccttcggcgccggcaccaagctggagctgaagcggtcggatcccaccaccaccccagccccacggccacctacccctgccccaaccatcgccagccagcccctgagcctgcggcctgaagcctgcaggcctgccgccggaggagccgtgcacacaaggggcctggacttcgcctgcgacatctatatctgggcccccctggccgggacatgcggggtgctgctgctgtccctggtgattacactgtattgcaaacggggccggaagaagctgctgtacatcttcaagcagcccttcatgcggcccgtgcagaccacccaggaggaggacggctgcagctgccggttccccgaggaagaggaaggcggctgcgagctgcgggtgaagttcagccggagcgccgacgccccagcctaccagcagggccagaaccagctgtacaacgagctgaacctgggacggcgggaggagtacgacgtgctggacaagcggcggggacgggaccccgagatgggcggcaagcctcgccggaagaatccccaggagggcctgtacaacgagctgcagaaggacaagatggccgaggcctacagcgagatcggcatgaagggcgagcggcgccggggcaagggccacgacggcctgtaccagggcctgagcaccgccaccaaggacacctacgacgccctgcacatgcaggccctgccaccccggtga

SEQ ID NO: 389 - protein, 760 aa, Artificial Sequence
  Description of Artificial Sequence: Synthetic polypeptide
LLLVTSLLLCELPHPAFLLIPEVQLQQSGAELVKPGASVKMSCKASGYTFTSYNMHWVKQTPGQGLEWIGAIYPGNGDTSYNQKFKGKATLTADKSSSTAYMQLSSLTSEDSADYYCARSNYYGSSYWFFDVWGAGTTVTVSSGGGGSGGGGSGGGGSDIVLTQSPAILSASPGEKVTMTCRASSSVNYMDWYQKKPGSSPKPWIYATSNLASGVPARFSGSGSGTSYSLTISRVEAEDAATYYCQQWSFNPPTFGGGTKLEIKGGGGSGGGGSGGGGSGGGGSGGGGSDIQMTQTTSSLSASLGDRVTISCRASQDISKYLNWYQQKPDGTVKLLIYHTSRLHSGVPSRFSGSGSGTDYSLTISNLEQEDIATYFCQQGNTLPYTFGGGTKLEITGSTSGSGKPGSGEGSTKGEVKLQESGPGLVAPSQSLSVTCTVSGVSLPDYGVSWIRQPPRKGLEWLGVIWGSETTYYNSALKSRLTIIKDNSKSQVFLKMNSLQTDDTAIYYCAKHYYYGGSYAMDYWGQGTSVTVSSAAATTTPAPRPPTPAPTIASQPLSLRPEACRPAAGGAVHTRGLDFACDIYIWAPLAGTCGVLLLSLVITLYCKRGRKKLLYIFKQPFMRPVQTTQEEDGCSCRFPEEEEGGCELRVKFSRSADAPAYQQGQNQLYNELNLGRREEYDVLDKRRGRDPEMGGKPRRKNPQEGLYNELQKDKMAEAYSEIGMKGERRRGKGHDGLYQGLSTATKDTYDALHMQALPPR

SEQ ID NO: 390 - protein, 720 aa, Artificial Sequence
  Description of Artificial Sequence: Synthetic polypeptide
MSCKASGYTFTSYNMHWVKQTPGQGLEWIGAIYPGNGDTSYNQKFKGKATLTADKSSSTAYMQLSSLTSEDSADYYCARSNYYGSSYWFFDVWGAGTTVTVSSGGGGSGGGGSGGGGSDIVLTQSPAILSASPGEKVTMTCRASSSVNYMDWYQKKPGSSPKPWIYATSNLASGVPARFSGSGSGTSYSLTISRVEAEDAATYYCQQWSFNPPTFGGGTKLEIKGGGGSGGGGSGGGGSGGGGSGGGGSDIQMTQTTSSLSASLGDRVTISCRASQDISKYLNWYQQKPDGTVKLLIYHTSRLHSGVPSRFSGSGSGTDYSLTISNLEQEDIATYFCQQGNTLPYTFGGGTKLEITGSTSGSGKPGSGEGSTKGEVKLQESGPGLVAPSQSLSVTCTVSGVSLPDYGVSWIRQPPRKGLEWLGVIWGSETTYYNSALKSRLTIIKDNSKSQVFLKMNSLQTDDTAIYYCAKHYYYGGSYAMDYWGQGTSVTVSSAAATTTPAPRPPTPAPTIASQPLSLRPEACRPAAGGAVHTRGLDFACDIYIWAPLAGTCGVLLLSLVITLYCKRGRKKLLYIFKQPFMRPVQTTQEEDGCSCRFPEEEEGGCELRVKFSRSADAPAYQQGQNQLYNELNLGRREEYDVLDKRRGRDPEMGGKPRRKNPQEGLYNELQKDKMAEAYSEIGMKGERRRGKGHDGLYQGLSTATKDTYDALHMQALPPR

SEQ ID NO: 391 - DNA, 2217 bp, Artificial Sequence
  Description of Artificial Sequence: Synthetic polynucleotide
gaggtgcagttgcaacagtcaggagctgaactggtcaagccaggagccagcgtgaagatgagctgcaaggcctccggttacaccttcacctcctacaacatgcactgggtgaaacagaccccgggacaagggctcgaatggattggcgccatctaccccgggaatggcgatacttcgtacaaccagaagttcaagggaaaggccaccctgaccgccgacaagagctcctccaccgcgtatatgcagttgagctccctgacctccgaggactccgccgactactactgcgcacggtccaactactatggaagctcgtactggttcttcgatgtctggggggccggcaccactgtgaccgtcagctccgggggcggaggatccggtggaggcggaagcgggggtggaggatccgacattgtgctgactcagtccccggcaatcctgtcggcctcaccgggcgaaaaggtcacgatgacttgtagagcgtcgtccagcgtgaactacatggattggtaccaaaagaagcctggatcgtcacccaagccttggatctacgctacatctaacctggcctccggcgtgccagcgcggttcagcgggtccggctcgggcacctcatactcgctgaccatctcccgcgtggaggctgaggacgccgcgacctactactgccagcagtggtccttcaacccgccgacttttggaggcggtactaagctggagatcaaaggaggcggcggcagcggcgggggagggtccggagggggtggttctggtggaggaggatcgggaggcggtggcagcgacattcagatgactcagaccacctcctccctgtccgcctccctgggcgaccgcgtgaccatctcatgccgcgccagccaggacatctcgaagtacctcaactggtaccagcagaagcccgacggaaccgtgaagctcctgatctaccacacctcccggctgcacagcggagtgccgtctagattctcgggttcggggtcgggaactgactactcccttactatttccaacctggagcaggaggatattgccacctacttctgccaacaaggaaacaccctgccgtacacttttggcgggggaaccaagctggaaatcactggcagcacatccggttccgggaagcccggctccggagagggcagcaccaagggggaagtcaagctgcaggaatcaggacctggcctggtggccccgagccagtcactgtccgtgacttgtactgtgtccggagtgtcgctcccggattacggagtgtcctggatcaggcagccacctcggaaaggattggaatggctcggagtcatctggggttccgaaaccacctattacaactcggcactgaaatccaggctcaccattatcaaggataactccaagtcacaagtgttcctgaagatgaatagcctgcagactgacgacacggcgatctactattgcgccaagcactactactacggcggatcctacgctatggactactggggccaggggaccagcgtgaccgtgtcatccgcggccgcaactaccacccctgcccctcggccgccgactccggccccaaccatcgcaagccaacccctctccttgcgccccgaagcttgccgcccggccgcgggtggagccgtgcatacccgggggctggactttgcctgcgatatctacatttgggccccgctggccggcacttgcggcgtgctcctgctgtcgctggtcatcaccctttactgcaagaggggccggaagaagctgctttacatcttcaagcagccgttcatgcggcccgtgcagacgactcaggaagaggacggatgctcgtgcagattccctgaggaggaagaggggggatgcgaactgcgcgtcaagttctcacggtccgccgacgcccccgcatatcaacagggccagaatcagctctacaacgagctgaacctgggaaggagagaggagtacgacgtgctggacaagcgacgcggacgcgacccggagatgggggggaaaccacggcggaaaaaccctcaggaaggactgtacaacgaactccagaaagacaagatggcggaagcctactcagaaatcgggatgaagggagagcggaggaggggaaagggtcacgacgggctgtaccagggactgagcaccgccactaaggatacctacgatgccttgcatatgcaagcactcccaccccgg

SEQ ID NO: 392-416 - skipped (25 entries)

SEQ ID NO: 417 - DNA, 1395 bp, Artificial Sequence
  Description of Artificial Sequence: Synthetic polynucleotide
gaaattgtgatgacccagtcacccgccactcttagcctttcacccggtgagcgcgcaaccctgtcttgcagagcctcccaagacatctcaaaataccttaattggtatcaacagaagcccggacaggctcctcgccttctgatctaccacaccagccggctccattctggaatccctgccaggttcagcggtagcggatctgggaccgactacaccctcactatcagctcactgcagccagaggacttcgctgtctatttctgtcagcaagggaacaccctgccctacacctttggacagggcaccaagctcgagattaaaggtggaggtggcagcggaggaggtgggtccggcggtggaggaagccaggtccaactccaagaaagcggaccgggtcttgtgaagccatcagaaactctttcactgacttgtactgtgagcggagtgtctctccccgattacggggtgtcttggatcagacagccaccggggaagggtctggaatggattggagtgatttggggctctgagactacttactaccaatcatccctcaagtcacgcgtcaccatctcaaaggacaactctaagaatcaggtgtcactgaaactgtcatctgtgaccgcagccgacaccgccgtgtactattgcgctaagcattactattatggcgggagctacgcaatggattactggggacagggtactctggtcaccgtgtccagcaccactaccccagcaccgaggccacccaccccggctcctaccatcgcctcccagcctctgtccctgcgtccggaggcatgtagacccgcagctggtggggccgtgcatacccggggtcttgacttcgcctgcgatatctacatttgggcccctctggctggtacttgcggggtcctgctgctttcactcgtgatcactctttactgtaagcgcggtcggaagaagctgctgtacatctttaagcaacccttcatgaggcctgtgcagactactcaagaggaggacggctgttcatgccggttcccagaggaggaggaaggcggctgcgaactgcgcgtgaaattcagccgcagcgcagatgctccagcctaccagcaggggcagaaccagctctacaacgaactcaatcttggtcggagagaggagtacgacgtgctggacaagcggagaggacgggacccagaaatgggcgggaagccgcgcagaaagaatccccaagagggcctgtacaacgagctccaaaaggataagatggcagaagcctatagcgagattggtatgaaaggggaacgcagaagaggcaaaggccacgacggactgtaccagggactcagcaccgccaccaaggacacctatgacgctcttcacatgcaggccctgccgcctcgg

SEQ ID NO: 418-522 - skipped (105 entries)

SEQ ID NO: 523 - protein, 7 aa, Artificial Sequence
  Description of Artificial Sequence: Synthetic peptide
GYTFTSY

SEQ ID NO: 524-684 - skipped (161 entries)

SEQ ID NO: 685 - DNA, 1458 bp, Artificial Sequence
  Description of Artificial Sequence: Synthetic polynucleotide
atggccttaccagtgaccgccttgctcctgccgctggccttgctgctccacgccgccaggccggacatccagatgacacagactacatcctccctgtctgcctctctgggagacagagtcaccatcagttgcagggcaagtcaggacattagtaaatatttaaattggtatcagcagaaaccagatggaactgttaaactcctgatctaccatacatcaagattacactcaggagtcccatcaaggttcagtggcagtgggtctggaacagattattctctcaccattagcaacctggagcaagaagatattgccacttacttttgccaacagggtaatacgcttccgtacacgttcggaggggggaccaagctggagatcacaggtggcggtggctcgggcggtggtgggtcgggtggcggcggatctgaggtgaaactgcaggagtcaggacctggcctggtggcgccctcacagagcctgtccgtcacatgcactgtctcaggggtctcattacccgactatggtgtaagctggattcgccagcctccacgaaagggtctggagtggctgggagtaatatggggtagtgaaaccacatactataattcagctctcaaatccagactgaccatcatcaaggacaactccaagagccaagttttcttaaaaatgaacagtctgcaaactgatgacacagccatttactactgtgccaaacattattactacggtggtagctatgctatggactactggggccaaggaacctcagtcaccgtctcctcaaccacgacgccagcgccgcgaccaccaacaccggcgcccaccatcgcgtcgcagcccctgtccctgcgcccagaggcgtgccggccagcggcggggggcgcagtgcacacgagggggctggacttcgcctgtgatatctacatctgggcgcccttggccgggacttgtggggtccttctcctgtcactggttatcaccctttactgcaaacggggcagaaagaaactcctgtatatattcaaacaaccatttatgagaccagtacaaactactcaagaggaagatggctgtagctgccgatttccagaagaagaagaaggaggatgtgaactgagagtgaagttcagcaggagcgcagacgcccccgcgtacaagcagggccagaaccagctctataacgagctcaatctaggacgaagagaggagtacgatgttttggacaagagacgtggccgggaccctgagatggggggaaagccgagaaggaagaaccctcaggaaggcctgtacaatgaactgcagaaagataagatggcggaggcctacagtgagattgggatgaaaggcgagcgccggaggggcaaggggcacgatggcctttaccagggtctcagtacagccaccaaggacacctacgacgcccttcacatgcaggccctgccccctcgc

SEQ ID NO: 686 - protein, 242 aa, Artificial Sequence
  Description of Artificial Sequence: Synthetic polypeptide
DIQMTQTTSSLSASLGDRVTISCRASQDISKYLNWYQQKPDGTVKLLIYHTSRLHSGVPSRFSGSGSGTDYSLTISNLEQEDIATYFCQQGNTLPYTFGGGTKLEITGGGGSGGGGSGGGGSEVKLQESGPGLVAPSQSLSVTCTVSGVSLPDYGVSWIRQPPRKGLEWLGVIWGSETTYYNSALKSRLTIIKDNSKSQVFLKMNSLQTDDTAIYYCAKHYYYGGSYAMDYWGQGTSVTVSS

SEQ ID NO: 687 - protein, 16 aa, Artificial Sequence
  Description of Artificial Sequence: Synthetic peptide
VIWGSETTYYQSSLKS

SEQ ID NO: 688 - DNA, 812 bp, Artificial Sequence
  Description of Artificial Sequence: Synthetic polynucleotide
atggccctccctgtcaccgccctgctgcttccgctggctcttctgctccacgccgctcggcccgaaattgtgatgacccagtcacccgccactcttagcctttcacccggtgagcgcgcaaccctgtcttgcagagcctcccaagacatctcaaaataccttaattggtatcaacagaagcccggacaggctcctcgccttctgatctaccacaccagccggctccattctggaatccctgccaggttcagcggtagcggatctgggaccgactacaccctcactatcagctcactgcagccagaggacttcgctgtctatttctgtcagcaagggaacaccctgccctacacctttggacagggcaccaagctcgagattaaaggtggaggtggcagcggaggaggtgggtccggcggtggaggaagccaggtccaactccaagaaagcggaccgggtcttgtgaagccatcagaaactctttcactgacttgtactgtgagcggagtgtctctccccgattacggggtgtcttggatcagacagccaccggggaagggtctggaatggattggagtgatttggggctctgagactacttactaccaatcatccctcaagtcacgcgtcaccatctcaaaggacaactctaagaatcaggtgtcactgaaactgtcatctgtgaccgcagccgacaccgccgtgtactattgcgctaagcattactattatggcgggagctacgcaatggattactggggacagggtactctggtcaccgttccagccaccaccatcatcaccatcaccat

SEQ ID NO: 689 - protein, 485 aa, Artificial Sequence
  Description of Artificial Sequence: Synthetic polypeptide
MALPVTALLLPLALLLHAARPEIVMTQSPATLSLSPGERATLSCRASQDISKYLNWYQQKPGQAPRLLIYHTSRLHSGIPARFSGSGSGTDYTLTISSLQPEDFAVYFCQQGNTLPYTFGQGTKLEIKGGGGSGGGGSGGGGSQVQLQESGPGLVKPSETLSLTCTVSGVSLPDYGVSWIRQPPGKGLEWIGVIWGSETTYYQSSLKSRVTISKDNSKNQVSLKLSSVTAADTAVYYCAKHYYYGGSYAMDYWGQGTLVTVSSTTTPAPRPPTPAPTIASQPLSLRPEACRPAAGGAVHTRGLDFACDIYIWAPLAGTCGVLLLSLVITLYCKRGRKKLLYIFKQPFMRPVQTTQEEDGCSCRFPEEEEGGCELRVKFSRSADAPAYKQGQNQLYNELNLGRREEYDVLDKRRGRDPEMGGKPRRKNPQEGLYNELQKDKMAEAYSEIGMKGERRGKGHDGLYQGLSTATKDTYDALHMQALPPR

SEQ ID NO: 690 - DNA, 1458 bp, Artificial Sequence
  Description of Artificial Sequence: Synthetic polynucleotide
atggccctccctgtcaccgccctgctgcttccgctggctcttctgctccacgccgctcggcccgaaattgtgatgacccagtcacccgccactcttagcctttcacccggtgagcgcgcaaccctgtcttgcagagcctcccaagacatctcaaaataccttaattggtatcaacagaagcccggacaggctcctcgccttctgatctaccacaccagccggctccattctggaatccctgccaggttcagcggtagcggatctgggaccgactacaccctcactatcagctcactgcagccagaggacttcgctgtctatttctgtcagcaagggaacaccctgccctacacctttggacagggcaccaagctcgagattaaaggtggaggtggcagcggaggaggtgggtccggcggtggaggaagccaggtccaactccaagaaagcggaccgggtcttgtgaagccatcagaaactctttcactgacttgtactgtgagcggagtgtctctccccgattacggggtgtcttggatcagacagccaccggggaagggtctggaatggattggagtgatttggggctctgagactacttactaccaatcatccctcaagtcacgcgtcaccatctcaaaggacaactctaagaatcaggtgtcactgaaactgtcatctgtgaccgcagccgacaccgccgtgtactattgcgctaagcattactattatggcgggagctacgcaatggattactggggacagggtactctggtcaccgtgtccagcaccactaccccagcaccgaggccacccaccccggctcctaccatcgcctcccagcctctgtccctgcgtccggaggcatgtagacccgcagctggtggggccgtgcatacccggggtcttgacttcgcctgcgatatctacatttgggcccctctggctggtacttgcggggtcctgctgctttcactcgtgatcactctttactgtaagcgcggtcggaagaagctgctgtacatctttaagcaacccttcatgaggcctgtgcagactactcaagaggaggacggctgttcatgccggttcccagaggaggaggaaggcggctgcgaactgcgcgtgaaattcagccgcagcgcagatgctccagcctacaagcaggggcagaaccagctctacaacgaactcaatcttggtcggagagaggagtacgacgtgctggacaagcggagaggacgggacccagaaatgggcgggaagccgcgcagaaagaatccccaagagggcctgtacaacgagctccaaaaggataagatggcagaagcctatagcgagattggtatgaaaggggaacgcagaagaggcaaaggccacgacggactgtaccagggactcagcaccgccaccaaggacacctatgacgctcttcacatgcaggccctgccgcctcgg

SEQ ID NO: 691 - protein, 30 aa, Artificial Sequence
  Description of Artificial Sequence: Synthetic polypeptide
  SITE (1)..(30): This sequence may encompass 1-6 "Gly Gly Gly Gly Ser" repeating units
GGGGSGGGGSGGGGSGGGGSGGGGSGGGGS

SEQ ID NO: 692-743 - skipped (52 entries)

SEQ ID NO: 744 - protein, 12 aa, Artificial Sequence
  Description of Artificial Sequence: Synthetic peptide
GDSMLSNSDTWN

SEQ ID NO: 745 - protein, 7 aa, Artificial Sequence
  Description of Artificial Sequence: Synthetic peptide
SNSDTWN

SEQ ID NO: 746 - protein, 18 aa, Artificial Sequence
  Description of Artificial Sequence: Synthetic peptide
RTYHRSTWYDDYASSVRG

SEQ ID NO: 747 - protein, 18 aa, Artificial Sequence
  Description of Artificial Sequence: Synthetic peptide
RTYHRSTWYDDYASSVRG

SEQ ID NO: 748 - protein, 15 aa, Artificial Sequence
  Description of Artificial Sequence: Synthetic peptide
VRLQDGNSWSDAFDV

SEQ ID NO: 749 - protein, 15 aa, Artificial Sequence
  Description of Artificial Sequence: Synthetic peptide
VRLQDGNSWSDAFDV

SEQ ID NO: 750 - protein, 14 aa, Artificial Sequence
  Description of Artificial Sequence: Synthetic peptide
TGTSSDVGGYNYVS

SEQ ID NO: 751 - protein, 7 aa, Artificial Sequence
  Description of Artificial Sequence: Synthetic peptide
DVSNRPS

SEQ ID NO: 752 - protein, 11 aa, Artificial Sequence
  Description of Artificial Sequence: Synthetic peptide
SSYTSSSTLYV

SEQ ID NO: 753 - protein, 253 aa, Artificial Sequence
  Description of Artificial Sequence: Synthetic polypeptide
EVQLQQSGPGLVKPSQTLSLTCAISGDSMLSNSDTWNWIRQSPSRGLEWLGRTYHRSTWYDDYASSVRGRVSINVDTSKNQYSLQLNAVTPEDTGVYYCARVRLQDGNSWSDAFDVWGQGTMVTVSSGGGGSGGGGSGGGGSQSALTQPASASGSPGQSVTISCTGTSSDVGGYNYVSWYQQHPGKAPKLMIYDVSNRPSGVSNRFSGSKSGNTASLTISGLQAEDEADYYCSSYTSSSTLYVFGTGTQLTVL

SEQ ID NO: 754 - protein, 127 aa, Artificial Sequence
  Description of Artificial Sequence: Synthetic polypeptide
EVQLQQSGPGLVKPSQTLSLTCAISGDSMLSNSDTWNWIRQSPSRGLEWLGRTYHRSTWYDDYASSVRGRVSINVDTSKNQYSLQLNAVTPEDTGVYYCARVRLQDGNSWSDAFDVWGQGTMVTVSS

SEQ ID NO: 755 - protein, 111 aa, Artificial Sequence
  Description of Artificial Sequence: Synthetic polypeptide
QSALTQPASASGSPGQSVTISCTGTSSDVGGYNYVSWYQQHPGKAPKLMIYDVSNRPSGVSNRFSGSKSGNTASLTISGLQAEDEADYYCSSYTSSSTLYVFGTGTQLTVL

SEQ ID NO: 756 - skipped

SEQ ID NO: 757 - protein, 465 aa, Artificial Sequence
  Description of Artificial Sequence: Synthetic polypeptide
DIQMTQTTSSLSASLGDRVTISCRASQDISKYLNWYQQKPDGTVKLLIYHTSRLHSGVPSRFSGSGSGTDYSLTISNLEQEDIATYFCQQGNTLPYTFGGGTKLEITGGGGSGGGGSGGGGSEVKLQESGPGLVAPSQSLSVTCTVSGVSLPDYGVSWIRQPPRKGLEWLGVIWGSETTYYNSALKSRLTIIKDNSKSQVFLKMNSLQTDDTAIYYCAKHYYYGGSYAMDYWGQGTSVTVSSTTTPAPRPPTPAPTIASQPLSLRPEACRPAAGGAVHTRGLDFACDIYIWAPLAGTCGVLLLSLVITLYCKRGRKKLLYIFKQPFMRPVQTTQEEDGCSCRFPEEEEGGCELRVKFSRSADAPAYKQGQNQLYNELNLGRREEYDVLDKRRGRDPEMGGKPRRKNPQEGLYNELQKDKMAEAYSEIGMKGERRRGKGHDGLYQGLSTATKDTYDALHMQALPPR

SEQ ID NO: 758 - protein, 241 aa, Artificial Sequence
  Description of Artificial Sequence: Synthetic polypeptide
EIVMTQSPATLSLSPGERATLSCRASQDISKYLNWYQQKPGQAPRLLIYHTSRLHSGIPARFSGSGSGTDYTLTISSLQPEDFAVYFCQQGNTLPYTFGQGTKLEIKGGGGSGGGGSGGGGSQVQLQESGPGLVKPSETLSLTCTVSGVSLPDYGVSWIRQPPGKGLEWIGVIWGSETTYYQSSLKSRVTISKDNSKNQVSLKLSSVTAADTAVYCAKHYYYGGSYAMDYWGQGTLVTVSS

SEQ ID NO: 759 - protein, 465 aa, Artificial Sequence
  Description of Artificial Sequence: Synthetic polypeptide
EIVMTQSPATLSLSPGERATLSCRASQDISKYLNWYQQKPGQAPRLLIYHTSRLHSGIPARFSGSGSGTDYTLTISSLQPEDFAVYFCQQGNTLPYTFGQGTKLEIKGGGGSGGGGSGGGGSQVQLQESGPGLVKPSETLSLTCTVSGVSLPDYGVSWIRQPPGKGLEWIGVIWGSETTYYQSSLKSRVTISKDNSKNQVSLKLSSVTAADTAVYYCAKHYYYGGSYAMDYWGQGTLVTVSSTTTPAPRPPTPAPTIASQPLSLRPEACRPAAGGAVHTRGLDFACDIYIWAPLAGTCGVLLLSLVITLYCKRGRKKLLYIFKQPFMRPVQTTQEEDGCSCRFPEEEEGGCELRVKFSRSADAPAYKQGQNQLYNELNLGRREEYDVLDKRRGRDPEMGGKPRRKNPQEGLYNELQKDKMAEAYSEIGMKGERRRGKGHDGLYQGLSTATKDTYDALHMQALPPR

SEQ ID NO: 760 - protein, 5 aa, Artificial Sequence
  Description of Artificial Sequence: Synthetic peptide
DYGVS

SEQ ID NO: 761 - protein, 16 aa, Artificial Sequence
  Description of Artificial Sequence: Synthetic peptide
VIWGSETTYYNSALKS

SEQ ID NO: 762 - protein, 12 aa, Artificial Sequence
  Description of Artificial Sequence: Synthetic peptide
HYYYGGSYAMDY

SEQ ID NO: 763 - protein, 11 aa, Artificial Sequence
  Description of Artificial Sequence: Synthetic peptide
RASQDISKYLN

SEQ ID NO: 764 - protein, 7 aa, Artificial Sequence
  Description of Artificial Sequence: Synthetic peptide
HTSRLHS

SEQ ID NO: 765 - protein, 9 aa, Artificial Sequence
  Description of Artificial Sequence: Synthetic peptide
QQGNTLPYT

SEQ ID NO: 766 - protein, 486 aa, Artificial Sequence
  Description of Artificial Sequence: Synthetic polypeptide
MALPVTALLLPLALLLHAARPDIQMTQTTSSLSASLGDRVTISCRASQDISKYLNWYQQKPDGTVKLLIYHTSRLHSGVPSRFSGSGSGTDYSLTISNLEQEDIATYFCQQGNTLPYTFGGGTKLEITGGGGSGGGGSGGGGSEVKLQESGPGLVAPSQSLSVTCTVSGVSLPDYGVSWIRQPPRKGLEWLGVIWGSETTYYNSALKSRLTIIKDNSKSQVFLKMNSLQTDDTAIYYCAKHYYYGGSYAMDYWGQGTSVTVSSTTTPAPRPPTPAPTIASQPLSLRPEACRPAAGGAVHTRGLDFACDIYIWAPLAGTCGVLLLSLVITLYCKRGRKKLLYIFKQPFMRPVQTTQEEDGCSCRFPEEEEGGCELRVKFSRSADAPAYKQGQNQLYNELNLGRREEYDVLDKRRGRDPEMGGKPRRKNPQEGLYNELQKDKMAEAYSEIGMKGERRRGKGHDGLYQGLSTATKDTYDALHMQALPPR

SEQ ID NO: 767-768 - skipped (2 entries)

SEQ ID NO: 769 - protein, 5 aa, Artificial Sequence
  Description of Artificial Sequence: Synthetic peptide
NYNLH

SEQ ID NO: 770 - protein, 17 aa, Artificial Sequence
  Description of Artificial Sequence: Synthetic peptide
AIYPGNYDTSYNQKFKG

SEQ ID NO: 771 - protein, 13 aa, Artificial Sequence
  Description of Artificial Sequence: Synthetic peptide
VDFGHSRYWYFDV

SEQ ID NO: 772 - protein, 7 aa, Artificial Sequence
  Description of Artificial Sequence: Synthetic peptide
GYTFTNY

SEQ ID NO: 773 - protein, 6 aa, Artificial Sequence
  Description of Artificial Sequence: Synthetic peptide
YPGNYD

SEQ ID NO: 774 - protein, 8 aa, Artificial Sequence
  Description of Artificial Sequence: Synthetic peptide
GYTFTNYN

SEQ ID NO: 775 - protein, 8 aa, Artificial Sequence
  Description of Artificial Sequence: Synthetic peptide
IYPGNYDT

SEQ ID NO: 776 - protein, 15 aa, Artificial Sequence
  Description of Artificial Sequence: Synthetic peptide
ARVDFGHSRYWYFDV

SEQ ID NO: 777 - protein, 10 aa, Artificial Sequence
  Description of Artificial Sequence: Synthetic peptide
GYTFTNYNLH

SEQ ID NO: 778 - protein, 122 aa, Artificial Sequence
  Description of Artificial Sequence: Synthetic polypeptide
QVQLVQSGAEVKKPGASVKVSCKASGYTFTNYNLHWVRQAPGQGLEWMGAIYPGNYDTSYNQKFKGRVTMTADKSTSTAYMELSSLRSEDTAVYYCARVDFGHSRYWYFDVWGQGTTVTVSS

SEQ ID NO: 779 - DNA, 366 bp, Artificial Sequence
  Description of Artificial Sequence: Synthetic polynucleotide
caagtccaactcgtccagtccggtgcagaagtcaagaaacctggagcatccgtgaaagtgtcttgcaaagcctccggctacaccttcaccaactacaacctccattgggtcagacaggcccccggacaaggactcgaatggatgggagcgatctacccgggaaactacgacaccagctacaaccagaagttcaagggccgcgtgactatgaccgccgataagagcacctccaccgcctacatggaactgtcctcgctgaggtccgaggacactgcggtgtactactgcgcccgcgtggacttcggacactcacggtattggtacttcgacgtctggggacagggcactaccgtgaccgtgtcgagc

SEQ ID NO: 780 - protein, 10 aa, Artificial Sequence
  Description of Artificial Sequence: Synthetic peptide
RATSSVSSMN

SEQ ID NO: 781 - protein, 7 aa, Artificial Sequence
  Description of Artificial Sequence: Synthetic peptide
ATSNLAS

SEQ ID NO: 782 - protein, 9 aa, Artificial Sequence
  Description of Artificial Sequence: Synthetic peptide
QQWTFNPPT

SEQ ID NO: 783 - protein, 6 aa, Artificial Sequence
  Description of Artificial Sequence: Synthetic peptide
TSSVSS

SEQ ID NO: 784 - protein, 3 aa, Artificial Sequence
  Description of Artificial Sequence: Synthetic peptide
ATS

SEQ ID NO: 785 - protein, 6 aa, Artificial Sequence
  Description of Artificial Sequence: Synthetic peptide
WTFNPP

SEQ ID NO: 786 - protein, 5 aa, Artificial Sequence
  Description of Artificial Sequence: Synthetic peptide
SSVSS

SEQ ID NO: 787 - protein, 106 aa, Artificial Sequence
  Description of Artificial Sequence: Synthetic polypeptide
DIQLTQSPSFLSASVGDRVTITCRATSSVSSMNWYQQKPGKAPKPLIHATSNLASGVPSRFSGSGSGTEYTLTISSLQPEDFATYYCQQWTFNPPTFGQGTKLEIK

SEQ ID NO: 788 - DNA, 318 bp, Artificial Sequence
  Description of Artificial Sequence: Synthetic polynucleotide
gatatccagctgactcagtccccgtcattcctgtccgcctccgtgggagacagagtgaccatcacctgtcgggccacttcctccgtgtcaagcatgaactggtatcagcagaagcccgggaaggccccaaagccgctgattcacgcgacgtccaacctggcttccggcgtgccgagccggttctccggctcggggagcgggactgagtacaccctgactatttcctcgcttcaacccgaggactttgctacctactactgccaacagtggaccttcaatcctccgacattcggacagggtaccaagttggaaatcaag

SEQ ID NO: 789 - protein, 248 aa, Artificial Sequence
  Description of Artificial Sequence: Synthetic polypeptide
QVQLVQSGAEVKKPGASVKVSCKASGYTFTNYNLHWVRQAPGQGLEWMGAIYPGNYDTSYNQKFKGRVTMTADKSTSTAYMELSSLRSEDTAVYYCARVDFGHSRYWYFDVWGQGTTVTVSSGGGGSGGGGSGGGGSGGGGSDIQLTQSPSFLSASVGDRVTITCRATSSVSSMNWYQQKPGKAPKPLIHATSNLASGVPSRFSGSGSGTEYTLTISSLQPEDFATYYCQQWTFNPPTFGQGTKLEIK

SEQ ID NO: 790 - DNA, 744 bp, Artificial Sequence
  Description of Artificial Sequence: Synthetic polynucleotide
caagtccaactcgtccagtccggtgcagaagtcaagaaacctggagcatccgtgaaagtgtcttgcaaagcctccggctacaccttcaccaactacaacctccattgggtcagacaggcccccggacaaggactcgaatggatgggagcgatctacccgggaaactacgacaccagctacaaccagaagttcaagggccgcgtgactatgaccgccgataagagcacctccaccgcctacatggaactgtcctcgctgaggtccgaggacactgcggtgtactactgcgcccgcgtggacttcggacactcacggtattggtacttcgacgtctggggacagggcactaccgtgaccgtgtcgagcggcggaggaggttcgggagggggcggatcagggggcggcggcagcggtggagggggctcggatatccagctgactcagtccccgtcattcctgtccgcctccgtgggagacagagtgaccatcacctgtcgggccacttcctccgtgtcaagcatgaactggtatcagcagaagcccgggaaggccccaaagccgctgattcacgcgacgtccaacctggcttccggcgtgccgagccggttctccggctcggggagcgggactgagtacaccctgactatttcctcgcttcaacccgaggactttgctacctactactgccaacagtggaccttcaatcctccgacattcggacagggtaccaagttggaaatcaag

SEQ ID NO: 791 - protein, 492 aa, Artificial Sequence
  Description of Artificial Sequence: Synthetic polypeptide
MALPVTALLLPLALLLHAARPQVQLVQSGAEVKKPGASVKVSCKASGYTFTNYNLHWVRQAPGQGLEWMGAIYPGNYDTSYNQKFKGRVTMTADKSTSTAYMELSSLRSEDTAVYYCARVDFGHSRYWYFDVWGQGTTVTVSSGGGGSGGGGSGGGGSGGGGSDIQLTQSPSFLSASVGDRVTITCRATSSVSSMNWYQQKPGKAPKPLIHATSNLASGVPSRFSGSGSGTEYTLTISSLQPEDFATYYCQQWTFNPPTFGQGTKLEIKTTTPAPRPPTPAPTIASQPLSLRPEACRPAAGGAVHTRGLDFACDIYIWAPLAGTCGVLLLSLVITLYCKRGRKKLLYIFKQPFMRPVQTTQEEDGCSCRFPEEEEGGCELRVKFSRSADAPAYQQGQNQLYNELNLGRREEYDVLDKRRGRDPEMGGKPRRKNPQEGLYNELQKDKMAEAYSEIGMKGERRRGKGHDGLYQGLSTATKDTYDALHMQALPPR

SEQ ID NO: 792 - DNA, 1476 bp, Artificial Sequence
  Description of Artificial Sequence: Synthetic polynucleotide
atggccctccctgtcaccgccctgctgcttccgctggctcttctgctccacgccgctcggccccaagtccaactcgtccagtccggtgcagaagtcaagaaacctggagcatccgtgaaagtgtcttgcaaagcctccggctacaccttcaccaactacaacctccattgggtcagacaggcccccggacaaggactcgaatggatgggagcgatctacccgggaaactacgacaccagctacaaccagaagttcaagggccgcgtgactatgaccgccgataagagcacctccaccgcctacatggaactgtcctcgctgaggtccgaggacactgcggtgtactactgcgcccgcgtggacttcggacactcacggtattggtacttcgacgtctggggacagggcactaccgtgaccgtgtcgagcggcggaggaggttcgggagggggcggatcagggggcggcggcagcggtggagggggctcggatatccagctgactcagtccccgtcattcctgtccgcctccgtgggagacagagtgaccatcacctgtcgggccacttcctccgtgtcaagcatgaactggtatcagcagaagcccgggaaggccccaaagccgctgattcacgcgacgtccaacctggcttccggcgtgccgagccggttctccggctcggggagcgggactgagtacaccctgactatttcctcgcttcaacccgaggactttgctacctactactgccaacagtggaccttcaatcctccgacattcggacagggtaccaagttggaaatcaagaccactaccccagcaccgaggccacccaccccggctcctaccatcgcctcccagcctctgtccctgcgtccggaggcatgtagacccgcagctggtggggccgtgcatacccggggtcttgacttcgcctgcgatatctacatttgggcccctctggctggtacttgcggggtcctgctgctttcactcgtgatcactctttactgtaagcgcggtcggaagaagctgctgtacatctttaagcaacccttcatgaggcctgtgcagactactcaagaggaggacggctgttcatgccggttcccagaggaggaggaaggcggctgcgaactgcgcgtgaaattcagccgcagcgcagatgctccagcctaccagcaggggcagaaccagctctacaacgaactcaatcttggtcggagagaggagtacgacgtgctggacaagcggagaggacgggacccagaaatgggcgggaagccgcgcagaaagaatccccaagagggcctgtacaacgagctccaaaaggataagatggcagaagcctatagcgagattggtatgaaaggggaacgcagaagaggcaaaggccacgacggactgtaccagggactcagcaccgccaccaaggacacctatgacgctcttcacatgcaggccctgccgcctcgg

SEQ ID NO: 793 - protein, 5 aa, Artificial Sequence
  Description of Artificial Sequence: Synthetic peptide
SYNMH

SEQ ID NO: 794 - protein, 17 aa, Artificial Sequence
  Description of Artificial Sequence: Synthetic peptide
AIYPGNGDTSYNPKFKG

SEQ ID NO: 795 - protein, 13 aa, Artificial Sequence
  Description of Artificial Sequence: Synthetic peptide
SYFYGSSSWYFDV

SEQ ID NO: 796 - protein, 6 aa, Artificial Sequence
  Description of Artificial Sequence: Synthetic peptide
YPGNGD

SEQ ID NO: 797 - protein, 8 aa, Artificial Sequence
  Description of Artificial Sequence: Synthetic peptide
GYTFTSYN

SEQ ID NO: 798 - protein, 8 aa, Artificial Sequence
  Description of Artificial Sequence: Synthetic peptide
IYPGNGDT

SEQ ID NO: 799 - protein, 15 aa, Artificial Sequence
  Description of Artificial Sequence: Synthetic peptide
ARSYFYGSSSWYFDV

SEQ ID NO: 800 - protein, 10 aa, Artificial Sequence
  Description of Artificial Sequence: Synthetic peptide
GYTFTSYNMH

SEQ ID NO: 801 - protein, 122 aa, Artificial Sequence
  Description of Artificial Sequence: Synthetic polypeptide
QVQLVQSGAEVKKPGASVKVSCKASGYTFTSYNMHWVRQAPGQGLEWMGAIYPGNGDTSYNPKFKGRVTMTADKSTRTAYMELSSLRSEDTAVYYCARSYFYGSSSWYFDVWGQGTTVTVSS

SEQ ID NO: 802 - DNA, 366 bp, Artificial Sequence
  Description of Artificial Sequence: Synthetic polynucleotide
caagtgcagctcgtccagtccggtgcagaagtcaagaaacccggtgcttcagtgaaagtgtcctgcaaggcctccggttacaccttcacctcctacaacatgcactgggtccgccaagccccgggccagggactcgaatggatgggagccatctaccctggcaacggggacacctcatacaaccctaagttcaagggcagagtgaccatgactgcggacaagtccactagaacagcgtacatggagctgagcagcctgcggtccgaggatactgccgtgtactactgcgcccgctcctacttctacggaagctcgtcgtggtacttcgatgtctggggacagggcaccactgtgactgtgtcctcc

SEQ ID NO: 803 - protein, 10 aa, Artificial Sequence
  Description of Artificial Sequence: Synthetic peptide
RASSSVSSMH

SEQ ID NO: 804 - protein, 9 aa, Artificial Sequence
  Description of Artificial Sequence: Synthetic peptide
QQWIFNPPT

SEQ ID NO: 805 - protein, 6 aa, Artificial Sequence
  Description of Artificial Sequence: Synthetic peptide
SSSVSS

SEQ ID NO: 806 - protein, 6 aa, Artificial Sequence
  Description of Artificial Sequence: Synthetic peptide
WIFNPP

SEQ ID NO: 807 - protein, 106 aa, Artificial Sequence
  Description of Artificial Sequence: Synthetic polypeptide
EIVLTQSPATLSLSPGERATLSCRASSSVSSMHWYQQKPGQAPRPLIFATSNLASGIPARFSGSGSGTDYTLTISSLEPEDAAVYYCQQWIFNPPTFGGGTKVEIK

SEQ ID NO: 808 - DNA, 318 bp, Artificial Sequence
  Description of Artificial Sequence: Synthetic polynucleotide
gaaattgtgctgactcagagccccgccaccctgagcttgtcccccggggaaagggcaacgctgtcatgccgcgcctcgtcatccgtgtcctccatgcattggtaccagcagaagccgggacaggcccctcggccgctgatcttcgccacctccaatctcgcttccggcattccggcccggttctcgggaagcgggtcggggaccgactataccctgaccatctctagccttgaacctgaggacgccgcggtgtactattgtcaacagtggatctttaaccccccaaccttcggtggaggcaccaaagtggagattaag

SEQ ID NO: 809 - protein, 248 aa, Artificial Sequence
  Description of Artificial Sequence: Synthetic polypeptide
QVQLVQSGAEVKKPGASVKVSCKASGYTFTSYNMHWVRQAPGQGLEWMGAIYPGNGDTSYNPKFKGRVTMTADKSTRTAYMELSSLRSEDTAVYYCARSYFYGSSSWYFDVWGQGTTVTVSSGGGGSGGGGSGGGGSGGGGSEIVLTQSPATLSLSPGERATLSCRASSSVSSMHWYQQKPGQAPRPLIFATSNLASGIPARFSGSGSGTDYTLTISSLEPEDAAVYYCQQWIFNPPTFGGGTKVEIK

SEQ ID NO: 810 - DNA, 744 bp, Artificial Sequence
  Description of Artificial Sequence: Synthetic polynucleotide
caagtgcagctcgtccagtccggtgcagaagtcaagaaacccggtgcttcagtgaaagtgtcctgcaaggcctccggttacaccttcacctcctacaacatgcactgggtccgccaagccccgggccagggactcgaatggatgggagccatctaccctggcaacggggacacctcatacaaccctaagttcaagggcagagtgaccatgactgcggacaagtccactagaacagcgtacatggagctgagcagcctgcggtccgaggatactgccgtgtactactgcgcccgctcctacttctacggaagctcgtcgtggtacttcgatgtctggggacagggcaccactgtgactgtgtcctccggtggcggaggctcgggcggaggcggaagcggcggcgggggatcgggaggaggagggtccgaaattgtgctgactcagagccccgccaccctgagcttgtcccccggggaaagggcaacgctgtcatgccgcgcctcgtcatccgtgtcctccatgcattggtaccagcagaagccgggacaggcccctcggccgctgatcttcgccacctccaatctcgcttccggcattccggcccggttctcgggaagcgggtcggggaccgactataccctgaccatctctagccttgaacctgaggacgccgcggtgtactattgtcaacagtggatctttaaccccccaaccttcggtggaggcaccaaagtggagattaag

SEQ ID NO: 811 - protein, 492 aa, Artificial Sequence
  Description of Artificial Sequence: Synthetic polypeptide
MALPVTALLLPLALLLHAARPQVQLVQSGAEVKKPGASVKVSCKASGYTFTSYNMHWVRQAPGQGLEWMGAIYPGNGDTSYNPKFKGRVTMTADKSTRTAYMELSSLRSEDTAVYYCARSYFYGSSSWYFDVWGQGTTVTVSSGGGGSGGGGSGGGGSGGGGSEIVLTQSPATLSLSPGERATLSCRASSSVSSMHWYQQKPGQAPRPLIFATSNLASGIPARFSGSGSGTDYTLTISSLEPEDAAVYYCQQWIFNPPTFGGGTKVEIKTTTPAPRPPTPAPTIASQPLSLRPEACRPAAGGAVHTRGLDFACDIYIWAPLAGTCGVLLLSLVITLYCKRGRKKLLYIFKQPFMRPVQTTQEEDGCSCRFPEEEEGGCELRVKFSRSADAPAYQQGQNQLYNELNLGRREEYDVLDKRRGRDPEMGGKPRRKNPQEGLYNELQKDKMAEAYSEIGMKGERRRGKGHDGLYQGLSTATKDTYDALHMQALPPR

SEQ ID NO: 812 - DNA, 1476 bp, Artificial Sequence
  Description of Artificial Sequence: Synthetic polynucleotide
atggccctccctgtcaccgccctgctgcttccgctggctcttctgctccacgccgctcggccccaagtgcagctcgtccagtccggtgcagaagtcaagaaacccggtgcttcagtgaaagtgtcctgcaaggcctccggttacaccttcacctcctacaacatgcactgggtccgccaagccccgggccagggactcgaatggatgggagccatctaccctggcaacggggacacctcatacaaccctaagttcaagggcagagtgaccatgactgcggacaagtccactagaacagcgtacatggagctgagcagcctgcggtccgaggatactgccgtgtactactgcgcccgctcctacttctacggaagctcgtcgtggtacttcgatgtctggggacagggcaccactgtgactgtgtcctccggtggcggaggctcgggcggaggcggaagcggcggcgggggatcgggaggaggagggtccgaaattgtgctgactcagagccccgccaccctgagcttgtcccccggggaaagggcaacgctgtcatgccgcgcctcgtcatccgtgtcctccatgcattggtaccagcagaagccgggacaggcccctcggccgctgatcttcgccacctccaatctcgcttccggcattccggcccggttctcgggaagcgggtcggggaccgactataccctgaccatctctagccttgaacctgaggacgccgcggtgtactattgtcaacagtggatctttaaccccccaaccttcggtggaggcaccaaagtggagattaagaccactaccccagcaccgaggccacccaccccggctcctaccatcgcctcccagcctctgtccctgcgtccggaggcatgtagacccgcagctggtggggccgtgcatacccggggtcttgacttcgcctgcgatatctacatttgggcccctctggctggtacttgcggggtcctgctgctttcactcgtgatcactctttactgtaagcgcggtcggaagaagctgctgtacatctttaagcaacccttcatgaggcctgtgcagactactcaagaggaggacggctgttcatgccggttcccagaggaggaggaaggcggctgcgaactgcgcgtgaaattcagccgcagcgcagatgctccagcctaccagcaggggcagaaccagctctacaacgaactcaatcttggtcggagagaggagtacgacgtgctggacaagcggagaggacgggacccagaaatgggcgggaagccgcgcagaaagaatccccaagagggcctgtacaacgagctccaaaaggataagatggcagaagcctatagcgagattggtatgaaaggggaacgcagaagaggcaaaggccacgacggactgtaccagggactcagcaccgccaccaaggacacctatgacgctcttcacatgcaggccctgccgcctcgg

SEQ ID NO: 813 - DNA, 2238 bp, Artificial Sequence
  Description of Artificial Sequence: Synthetic polynucleotide
atggccctccctgtcaccgccctgctgcttccgctggctcttctgctccacgccgctcggcccgaaattgtgatgacccagtcacccgccactcttagcctttcacccggtgagcgcgcaaccctgtcttgcagagcctcccaagacatctcaaaataccttaattggtatcaacagaagcccggacaggctcctcgccttctgatctaccacaccagccggctccattctggaatccctgccaggttcagcggtagcggatctgggaccgactacaccctcactatcagctcactgcagccagaggacttcgctgtctatttctgtcagcaagggaacaccctgccctacacctttggacagggcaccaagctcgagattaaaggtggaggtggcagcggaggaggtgggtccggcggtggaggaagccaggtccaactccaagaaagcggaccgggtcttgtgaagccatcagaaactctttcactgacttgtactgtgagcggagtgtctctccccgattacggggtgtcttggatcagacagccaccggggaagggtctggaatggattggagtgatttggggctctgagactacttactaccaatcatccctcaagtcacgcgtcaccatctcaaaggacaactctaagaatcaggtgtcactgaaactgtcatctgtgaccgcagccgacaccgccgtgtactattgcgctaagcattactattatggcgggagctacgcaatggattactggggacagggtactctggtcaccgtgtccagcttggcagaagccgccgcgaaagaagtgcagcttcaacaatcaggaccaggactcgtcaaaccatcacagaccctctccctcacatgtgccatctccggggactccatgttgagcaattccgacacttggaattggattagacaaagcccgtcccggggtctggaatggttgggacgcacctaccaccggtctacttggtacgacgactacgcgtcatccgtgcggggaagagtgtccatcaacgtggacacctccaagaaccagtacagcctgcagcttaatgccgtgactcctgaggatacgggcgtctactactgcgcccgcgtccgcctgcaagacgggaacagctggagcgatgcattcgatgtctggggccagggaactatggtcaccgtgtcgtctgggggcggtggatcgggtggcgggggttcggggggcggcggctctcagtccgctcttacccaaccggcctcagcctcggggagccccggccagagcgtgaccatttcctgcaccggcacttcatccgacgtgggcggctacaactacgtgtcctggtaccaacagcacccgggaaaggcccccaagctcatgatctacgacgtgtccaacaggccctcgggagtgtccaaccggttctcgggttcgaaatcgggaaacacagccagcctgaccatcagcggactgcaggctgaagatgaagccgactactactgctcctcctacacctcgtcatccacgctctacgtgttcggcactggaactcagctgactgtgctgaccactaccccagcaccgaggccacccaccccggctcctaccatcgcctcccagcctctgtccctgcgtccggaggcatgtagacccgcagctggtggggccgtgcatacccggggtcttgacttcgcctgcgatatctacatttgggcccctctggctggtacttgcggggtcctgctgctttcactcgtgatcactctttactgtaagcgcggtcggaagaagctgctgtacatctttaagcaacccttcatgaggcctgtgcagactactcaagaggaggacggctgttcatgccggttcccagaggaggaggaaggcggctgcgaactgcgcgtgaaattcagccgcagcgcagatgctccagcctaccagcaggggcagaaccagctctacaacgaactcaatcttggtcggagagaggagtacgacgtgctggacaagcggagaggacgggacccagaaatgggcgggaagccgcgcagaaagaatccccaagagggcctgtacaacgagctccaaaaggataagatggcagaagcctatagcgagattggtatgaaaggggaacgcagaagaggcaaaggccacgacggactgtaccagggactcagcaccgccaccaaggacacctatgacgctcttcacatgcaggccctgccgcctcgg

SEQ ID NO: 814 - protein, 746 aa, Artificial Sequence
  Description of Artificial Sequence: Synthetic polypeptide
MALPVTALLLPLALLLHAARPEIVMTQSPATLSLSPGERATLSCRASQDISKYLNWYQQKPGQAPRLLIYHTSRLHSGIPARFSGSGSGTDYTLTISSLQPEDFAVYFCQQGNTLPYTFGQGTKLEIKGGGGSGGGGSGGGGSQVQLQESGPGLVKPSETLSLTCTVSGVSLPDYGVSWIRQPPGKGLEWIGVIWGSETTYYQSSLKSRVTISKDNSKNQVSLKLSSVTAADTAVYYCAKHYYYGGSYAMDYWGQGTLVTVSSLAEAAAKEVQLQQSGPGLVKPSQTLSLTCAISGDSMLSNSDTWNWIRQSPSRGLEWLGRTYHRSTWYDDYASSVRGRVSINVDTSKNQYSLQLNAVTPEDTGVYYCARVRLQDGNSWSDAFDVWGQGTMVTVSSGGGGSGGGGSGGGGSQSALTQPASASGSPGQSVTISCTGTSSDVGGYNYVSWYQQHPGKAPKLMIYDVSNRPSGVSNRFSGSKSGNTASLTISGLQAEDEADYYCSSYTSSSTLYVFGTGTQLTVLTTTPAPRPPTPAPTIASQPLSLRPEACRPAAGGAVHTRGLDFACDIYIWAPLAGTCGVLLLSLVITLYCKRGRKKLLYIFKQPFMRPVQTTQEEDGCSCRFPEEEEGGCELRVKFSRSADAPAYQQGQNQLYNELNLGRREEYDVLDKRRGRDPEMGGKPRRKNPQEGLYNELQKDKMAEAYSEIGMKGERRRGKGHDGLYQGLSTATKDTYDALHMQALPPR

SEQ ID NO: 815 - DNA, 2232 bp, Artificial Sequence
  Description of Artificial Sequence: Synthetic polynucleotide
atggccctccctgtcaccgccctgctgcttccgctggctcttctgctccacgccgctcggcccgaagtgcagcttcaacaatcaggaccaggactcgtcaaaccatcacagaccctctccctcacatgtgccatctccggggactccatgttgagcaattccgacacttggaattggattagacaaagcccgtcccggggtctggaatggttgggacgcacctaccaccggtctacttggtacgacgactacgcgtcatccgtgcggggaagagtgtccatcaacgtggacacctccaagaaccagtacagcctgcagcttaatgccgtgactcctgaggatacgggcgtctactactgcgcccgcgtccgcctgcaagacgggaacagctggagcgatgcattcgatgtctggggccagggaactatggtcaccgtgtcgtctgggggcggtggatcgggtggcgggggttcggggggcggcggctctcagtccgctcttacccaaccggcctcagcctcggggagccccggccagagcgtgaccatttcctgcaccggcacttcatccgacgtgggcggctacaactacgtgtcctggtaccaacagcacccgggaaaggcccccaagctcatgatctacgacgtgtccaacaggccctcgggagtgtccaaccggttctcgggttcgaaatcgggaaacacagccagcctgaccatcagcggactgcaggctgaagatgaagccgactactactgctcctcctacacctcgtcatccacgctctacgtgttcggcactggaactcagctgactgtgctgggagggggagggagtgaaattgtgatgacccagtcacccgccactcttagcctttcacccggtgagcgcgcaaccctgtcttgcagagcctcccaagacatctcaaaataccttaattggtatcaacagaagcccggacaggctcctcgccttctgatctaccacaccagccggctccattctggaatccctgccaggttcagcggtagcggatctgggaccgactacaccctcactatcagctcactgcagccagaggacttcgctgtctatttctgtcagcaagggaacaccctgccctacacctttggacagggcaccaagctcgagattaaaggtggaggtggcagcggaggaggtgggtccggcggtggaggaagccaggtccaactccaagaaagcggaccgggtcttgtgaagccatcagaaactctttcactgacttgtactgtgagcggagtgtctctccccgattacggggtgtcttggatcagacagccaccggggaagggtctggaatggattggagtgatttggggctctgagactacttactaccaatcatccctcaagtcacgcgtcaccatctcaaaggacaactctaagaatcaggtgtcactgaaactgtcatctgtgaccgcagccgacaccgccgtgtactattgcgctaagcattactattatggcgggagctacgcaatggattactggggacagggtactctggtcaccgtgtccagcaccactaccccagcaccgaggccacccaccccggctcctaccatcgcctcccagcctctgtccctgcgtccggaggcatgtagacccgcagctggtggggccgtgcatacccggggtcttgacttcgcctgcgatatctacatttgggcccctctggctggtacttgcggggtcctgctgctttcactcgtgatcactctttactgtaagcgcggtcggaagaagctgctgtacatctttaagcaacccttcatgaggcctgtgcagactactcaagaggaggacggctgttcatgccggttcccagaggaggaggaaggcggctgcgaactgcgcgtgaaattcagccgcagcgcagatgctccagcctaccagcaggggcagaaccagctctacaacgaactcaatcttggtcggagagaggagtacgacgtgctggacaagcggagaggacgggacccagaaatgggcgggaagccgcgcagaaagaatccccaagagggcctgtacaacgagctccaaaaggataagatggcagaagcctatagcgagattggtatgaaaggggaacgcagaagaggcaaaggccacgacggactgtaccagggactcagcaccgccaccaaggacacctatgacgctcttcacatgcaggccctgccgcctcgg

SEQ ID NO: 816 - protein, 744 aa, Artificial Sequence
  Description of Artificial Sequence: Synthetic polypeptide
MALPVTALLLPLALLLHAARPEVQLQQSGPGLVKPSQTLSLTCAISGDSMLSNSDTWNWIRQSPSRGLEWLGRTYHRSTWYDDYASSVRGRVSINVDTSKNQYSLQLNAVTPEDTGVYYCARVRLQDGNSWSDAFDVWGQGTMVTVSSGGGGSGGGGSGGGGSQSALTQPASASGSPGQSVTISCTGTSSDVGGYNYVSWYQQHPGKAPKLMIYDVSNRPSGVSNRFSGSKSGNTASLTISGLQAEDEADYYCSSYTSSSTLYVFGTGTQLTVLGGGGSEIVMTQSPATLSLSPGERATLSCRASQDISKYLNWYQQKPGQAPRLLIYHTSRLHSGIPARFSGSGSGTDYTLTISSLQPEDFAVYFCQQGNTLPYTFGQGTKLEIKGGGGSGGGGSGGGGSQVQLQESGPGLVKPSETLSLTCTVSGVSLPDYGVSWIRQPPGKGLEWIGVIWGSETTYYQSSLKSRVTISKDNSKNQVSLKLSSVTAADTAVYYCAKHYYYGGSYAMDYWGQGTLVTVSSTTTPAPRPPTPAPTIASQPLSLRPEACRPAAGGAVHTRGLDFACDIYIWAPLAGTCGVLLLSLVITLYCKRGRKKLLYIFKQPFMRPVQTTQEEDGCSCRFPEEEEGGCELRVKFSRSADAPAYQQGQNQLYNELNLGRREEYDVLDKRRGRDPEMGGKPRRKNPQEGLYNELQKDKMAEAYSEIGMKGERRRGKGHDGLYQGLSTATKDTYDALHMQALPPR

SEQ ID NO: 817 - DNA, 2202 bp, Artificial Sequence
  Description of Artificial Sequence: Synthetic polynucleotide
atggccctccctgtcaccgccctgctgcttccgctggctcttctgctccacgccgctcggccccagtccgctcttacccaaccggcctcagcctcggggagccccggccagagcgtgaccatttcctgcaccggcacttcatccgacgtgggcggctacaactacgtgtcctggtaccaacagcacccgggaaaggcccccaagctcatgatctacgacgtgtccaacaggccctcgggagtgtccaaccggttctcgggttcgaaatcgggaaacacagccagcctgaccatcagcggactgcaggctgaagatgaagccgactactactgctcctcctacacctcgtcatccacgctctacgtgttcggcactggaactcagctgactgtgctgggcggaggaggctccgaagtgcagcttcaacaatcaggaccaggactcgtcaaaccatcacagaccctctccctcacatgtgccatctccggggactccatgttgagcaattccgacacttggaattggattagacaaagcccgtcccggggtctggaatggttgggacgcacctaccaccggtctacttggtacgacgactacgcgtcatccgtgcggggaagagtgtccatcaacgtggacacctccaagaaccagtacagcctgcagcttaatgccgtgactcctgaggatacgggcgtctactactgcgcccgcgtccgcctgcaagacgggaacagctggagcgatgcattcgatgtctggggccagggaactatggtcaccgtgtcgtctggagggggagggagtgaaattgtgatgacccagtcacccgccactcttagcctttcacccggtgagcgcgcaaccctgtcttgcagagcctcccaagacatctcaaaataccttaattggtatcaacagaagcccggacaggctcctcgccttctgatctaccacaccagccggctccattctggaatccctgccaggttcagcggtagcggatctgggaccgactacaccctcactatcagctcactgcagccagaggacttcgctgtctatttctgtcagcaagggaacaccctgccctacacctttggacagggcaccaagctcgagattaaaggtggaggtggcagcggaggaggtgggtccggcggtggaggaagccaggtccaactccaagaaagcggaccgggtcttgtgaagccatcagaaactctttcactgacttgtactgtgagcggagtgtctctccccgattacggggtgtcttggatcagacagccaccggggaagggtctggaatggattggagtgatttggggctctgagactacttactaccaatcatccctcaagtcacgcgtcaccatctcaaaggacaactctaagaatcaggtgtcactgaaactgtcatctgtgaccgcagccgacaccgccgtgtactattgcgctaagcattactattatggcgggagctacgcaatggattactggggacagggtactctggtcaccgtgtccagcaccactaccccagcaccgaggccacccaccccggctcctaccatcgcctcccagcctctgtccctgcgtccggaggcatgtagacccgcagctggtggggccgtgcatacccggggtcttgacttcgcctgcgatatctacatttgggcccctctggctggtacttgcggggtcctgctgctttcactcgtgatcactctttactgtaagcgcggtcggaagaagctgctgtacatctttaagcaacccttcatgaggcctgtgcagactactcaagaggaggacggctgttcatgccggttcccagaggaggaggaaggcggctgcgaactgcgcgtgaaattcagccgcagcgcagatgctccagcctaccagcaggggcagaaccagctctacaacgaactcaatcttggtcggagagaggagtacgacgtgctggacaagcggagaggacgggacccagaaatgggcgggaagccgcgcagaaagaatccccaagagggcctgtacaacgagctccaaaaggataagatggcagaagcctatagcgagattggtatgaaaggggaacgcagaagaggcaaaggccacgacggactgtaccagggactcagcaccgccaccaaggacacctatgacgctcttcacatgcaggccctgccgcctcgg

SEQ ID NO: 818 - protein, 734 aa, Artificial Sequence
  Description of Artificial Sequence: Synthetic polypeptide
MALPVTALLLPLALLLHAARPQSALTQPASASGSPGQSVTISCTGTSSDVGGYNYVSWYQQHPGKAPKLMIYDVSNRPSGVSNRFSGSKSGNTASLTISGLQAEDEADYYCSSYTSSSTLYVFGTGTQLTVLGGGGSEVQLQQSGPGLVKPSQTLSLTCAISGDSMLSNSDTWNWIRQSPSRGLEWLGRTYHRSTWYDDYASSVRGRVSINVDTSKNQYSLQLNAVTPEDTGVYYCARVRLQDGNSWSDAFDVWGQGTMVTVSSGGGGSEIVMTQSPATLSLSPGERATLSCRASQDISKYLNWYQQKPGQAPRLLIYHTSRLHSGIPARFSGSGSGTDYTLTISSLQPEDFAVYFCQQGNTLPYTFGQGTKLEIKGGGGSGGGGSGGGGSQVQLQESGPGLVKPSETLSLTCTVSGVSLPDYGVSWIRQPPGKGLEWIGVIWGSETTYYQSSLKSRVTISKDNSKNQVSLKLSSVTAADTAVYYCAKHYYYGGSYAMDYWGQGTLVTVSSTTTPAPRPPTPAPTIASQPLSLRPEACRPAAGGAVHTRGLDFACDIYIWAPLAGTCGVLLLSLVITLYCKRGRKKLLYIFKQPFMRPVQTTQEEDGCSCRFPEEEEGGCELRVKFSRSADAPAYQQGQNQLYNELNLGRREEYDVLDKRRGRDPEMGGKPRRKNPQEGLYNELQKDKMAEAYSEIGMKGERRRGKGHDGLYQGLSTATKDTYDALHMQALPPR

SEQ ID NO: 819 - DNA, 2232 bp, Artificial Sequence
  Description of Artificial Sequence: Synthetic polynucleotide
atggccctgcccgtgactgcgctcctgcttccgttggccctgctcctgcatgccgccagacctcagtccgctctgactcagccggcctcagcttcggggtcccctggtcaaagcgtcactatttcctgtaccggaacctcatcagacgtgggcggctacaattacgtgtcctggtaccaacagcaccccggaaaggctcctaagcttatgatctacgacgtgtccaaccggccgtcaggagtgtccaacagattctccggctccaagagcggaaacactgccagcttgaccattagcggcttgcaggccgaggacgaagccgactactactgctctagctacacatcctcgtctaccctctacgtgtttggaacggggacccagctgactgtgctcgggggtggaggatcagaggtgcaactccagcagtccggtcctggcctcgtgaaaccgtcccaaaccctgtccctgacttgcgccatctcgggcgactccatgctgtccaattccgacacctggaactggattagacaatcgcctagccggggactcgaatggctgggccggacctaccaccggtccacgtggtatgacgactacgcaagctccgtccggggaagggtgtccattaacgtcgatacctccaagaaccagtacagccttcagctgaacgctgtgacccccgaggataccggcgtctactactgtgcaagagtgcgattgcaggatggaaactcgtggtcggacgcattcgatgtctggggacagggaactatggtgaccgtgtcctcgggcggaggcgggagcggaggaggaggctctggcggaggaggaagcgagattgtcatgactcagtccccggccacactctccctgtcacccggagaaagagcaaccctgagctgcagggcgtcccaggacatctcgaagtacctgaactggtaccagcagaagcctggacaagcaccccgcctcctgatctaccacacctcgcggctgcattcgggaatccccgccagattctcagggagcggatcaggaaccgactacaccctgactatctcgagcctgcaaccagaggatttcgccgtgtacttctgccagcaaggaaacaccctgccctacacctttggacagggaaccaagctcgagattaaggggggtggtggatcgggagggggtggatcaggaggaggcggctcacaagtccagctgcaagaatccggtccgggacttgtgaagccgtccgaaaccctgtcactgacttgcactgtgtccggggtgtcattgcccgactacggcgtgagctggattcggcagccccctggaaagggattggaatggatcggcgtgatctggggttcggaaactacctactatcagtcctcactgaagtcccgcgtgaccatcagcaaggataattccaaaaaccaagtgtctctgaagctctccagcgtcactgccgccgatactgccgtgtactactgcgccaagcactactattacggcggttcgtacgccatggactactggggccaagggacactcgtgaccgtgtcatccaccactaccccagcaccgaggccacccaccccggctcctaccatcgcctcccagcctctgtccctgcgtccggaggcatgtagacccgcagctggtggggccgtgcatacccggggtcttgacttcgcctgcgatatctacatttgggcccctctggctggtacttgcggggtcctgctgctttcactcgtgatcactctttactgtaagcgcggtcggaagaagctgctgtacatctttaagcaacccttcatgaggcctgtgcagactactcaagaggaggacggctgttcatgccggttcccagaggaggaggaaggcggctgcgaactgcgcgtgaaattcagccgcagcgcagatgctccagcctaccagcaggggcagaaccagctctacaacgaactcaatcttggtcggagagaggagtacgacgtgctggacaagcggagaggacgggacccagaaatgggcgggaagccgcgcagaaagaatccccaagagggcctgtacaacgagctccaaaaggataagatggcagaagcctatagcgagattggtatgaaaggggaacgcagaagaggcaaaggccacgacggactgtaccagggactcagcaccgccaccaaggacacctatgacgctcttcacatgcaggccctgccgcctcgg

SEQ ID NO: 820 - protein, 744 aa, Artificial Sequence
  Description of Artificial Sequence: Synthetic polypeptide
MALPVTALLLPLALLLHAARPQSALTQPASASGSPGQSVTISCTGTSSDVGGYNYVSWYQQHPGKAPKLMIYDVSNRPSGVSNRFSGSKSGNTASLTISGLQAEDEADYYCSSYTSSSTLYVFGTGTQLTVLGGGGSEVQLQQSGPGLVKPSQTLSLTCAISGDSMLSNSDTWNWIRQSPSRGLEWLGRTYHRSTWYDDYASSVRGRVSINVDTSKNQYSLQLNAVTPEDTGVYYCARVRLQDGNSWSDAFDVWGQGTMVTVSSGGGGSGGGGSGGGGSEIVMTQSPATLSLSPGERATLSCRASQDISKYLNWYQQKPGQAPRLLIYHTSRLHSGIPARFSGSGSGTDYTLTISSLQPEDFAVYFCQQGNTLPYTFGQGTKLEIKGGGGSGGGGSGGGGSQVQLQESGPGLVKPSETLSLTCTVSGVSLPDYGVSWIRQPPGKGLEWIGVIWGSETTYYQSSLKSRVTISKDNSKNQVSLKLSSVTAADTAVYYCAKHYYYGGSYAMDYWGQGTLVTVSSTTTPAPRPPTPAPTIASQPLSLRPEACRPAAGGAVHTRGLDFACDIYIWAPLAGTCGVLLLSLVITLYCKRGRKKLLYIFKQPFMRPVQTTQEEDGCSCRFPEEEEGGCELRVKFSRSADAPAYQQGQNQLYNELNLGRREEYDVLDKRRGRDPEMGGKPRRKNPQEGLYNELQKDKMAEAYSEIGMKGERRRGKGHDGLYQGLSTATKDTYDALHMQALPPR

SEQ ID NO: 821 - DNA, 2232 bp, Artificial Sequence
  Description of Artificial Sequence: Synthetic polynucleotide
atggccctgcccgtgactgcgctcctgcttccgttggccctgctcctgcatgccgccagacctcagtccgctctgactcagccggcctcagcttcggggtcccctggtcaaagcgtcactatttcctgtaccggaacctcatcagacgtgggcggctacaattacgtgtcctggtaccaacagcaccccggaaaggctcctaagcttatgatctacgacgtgtccaaccggccgtcaggagtgtccaacagattctccggctccaagagcggaaacactgccagcttgaccattagcggcttgcaggccgaggacgaagccgactactactgctctagctacacatcctcgtctaccctctacgtgtttggaacggggacccagctgactgtgctcgggggtggaggatcagaggtgcaactccagcagtccggtcctggcctcgtgaaaccgtcccaaaccctgtccctgacttgcgccatctcgggcgactccatgctgtccaattccgacacctggaactggattagacaatcgcctagccggggactcgaatggctgggccggacctaccaccggtccacgtggtatgacgactacgcaagctccgtccggggaagggtgtccattaacgtcgatacctccaagaaccagtacagccttcagctgaacgctgtgacccccgaggataccggcgtctactactgtgcaagagtgcgattgcaggatggaaactcgtggtcggacgcattcgatgtctggggacagggaactatggtcactgtgtcctccggcggtggaggctcgggggggggcggctcaggaggaggcggctcacaagtccagctgcaagaatccggtccgggacttgtgaagccgtccgaaaccctgtcactgacttgcactgtgtccggggtgtcattgcccgactacggcgtgagctggattcggcagccccctggaaagggattggaatggatcggcgtgatctggggttcggaaactacctactatcagtcctcactgaagtcccgcgtgaccatcagcaaggataattccaaaaaccaagtgtctctgaagctctccagcgtcactgccgccgatactgccgtgtactactgcgccaagcactactattacggcggttcgtacgccatggactactggggacaaggcactcttgtgactgtgtcaagcggcggtggagggagcggtgggggcggttcaggaggaggcggatcagagatcgtgatgacccaatccccagccaccctgtccctcagccctggagaaagagccaccctgagctgccgggcctcccaggatatcagcaagtacttgaactggtaccaacaaaagccggggcaggcgccccggctcctgatctaccacacctcgcgcctccactcaggtatccccgccagattctcagggagcggctccggtactgactacaccctgactatttcctcactgcagccagaggactttgccgtgtacttctgccagcagggaaacactctgccgtacaccttcgggcagggaacgaagcttgaaattaagaccactaccccagcaccgaggccacccaccccggctcctaccatcgcctcccagcctctgtccctgcgtccggaggcatgtagacccgcagctggtggggccgtgcatacccggggtcttgacttcgcctgcgatatctacatttgggcccctctggctggtacttgcggggtcctgctgctttcactcgtgatcactctttactgtaagcgcggtcggaagaagctgctgtacatctttaagcaacccttcatgaggcctgtgcagactactcaagaggaggacggctgttcatgccggttcccagaggaggaggaaggcggctgcgaactgcgcgtgaaattcagccgcagcgcagatgctccagcctaccagcaggggcagaaccagctctacaacgaactcaatcttggtcggagagaggagtacgacgtgctggacaagcggagaggacgggacccagaaatgggcgggaagccgcgcagaaagaatccccaagagggcctgtacaacgagctccaaaaggataagatggcagaagcctatagcgagattggtatgaaaggggaacgcagaagaggcaaaggccacgacggactgtaccagggactcagcaccgccaccaaggacacctatgacgctcttcacatgcaggccctgccgcctcgg

SEQ ID NO: 822 - protein, 744 aa, Artificial Sequence
  Description of Artificial Sequence: Synthetic polypeptide
MALPVTALLLPLALLLHAARPQSALTQPASASGSPGQSVTISCTGTSSDVGGYNYVSWYQQHPGKAPKLMIYDVSNRPSGVSNRFSGSKSGNTASLTISGLQAEDEADYYCSSYTSSSTLYVFGTGTQLTVLGGGGSEVQLQQSGPGLVKPSQTLSLTCAISGDSMLSNSDTWNWIRQSPSRGLEWLGRTYHRSTWYDDYASSVRGRVSINVDTSKNQYSLQLNAVTPEDTGVYYCARVRLQDGNSWSDAFDVWGQGTMVTVSSGGGGSGGGGSGGGGSQVQLQESGPGLVKPSETLSLTCTVSGVSLPDYGVSWIRQPPGKGLEWIGVIWGSETTYYQSSLKSRVTISKDNSKNQVSLKLSSVTAADTAVYYCAKHYYYGGSYAMDYWGQGTLVTVSSGGGGSGGGGSGGGGSEIVMTQSPATLSLSPGERATLSCRASQDISKYLNWYQQKPGQAPRLLIYHTSRLHSGIPARFSGSGSGTDYTLTISSLQPEDFAVYFCQQGNTLPYTFGQGTKLEIKTTTPAPRPPTPAPTIASQPLSLRPEACRPAAGGAVHTRGLDFACDIYIWAPLAGTCGVLLLSLVITLYCKRGRKKLLYIFKQPFMRPVQTTQEEDGCSCRFPEEEEGGCELRVKFSRSADAPAYQQGQNQLYNELNLGRREEYDVLDKRRGRDPEMGGKPRRKNPQEGLYNELQKDKMAEAYSEIGMKGERRRGKGHDGLYQGLSTATKDTYDALHMQALPPR

SEQ ID NO: 823 - DNA, 2985 bp, Artificial Sequence
  Description of Artificial Sequence: Synthetic polynucleotide
atggccctccctgtcaccgccctgctgcttccgctggctcttctgctccacgccgctcggcccgaagtgcagctgcagcagtcagggcctggcctggtcaagccgtcgcagaccctctccctgacatgcgccattagcggggactccatgctgagcaactcggacacctggaactggattcggcagtccccttcccggggactcgagtggctcggacgcacctaccatcggagcacttggtacgacgactacgcctcctccgtgagaggtcgcgtgtcgatcaacgtggatacctcgaagaaccagtatagcttgcaactgaacgccgtgacccctgaggataccggagtgtactattgtgcgagagtcaggctgcaagacggaaactcctggtccgacgcatttgatgtctggggacagggtactatggtcacggtgtcatctggaggcggaggatcgcaaagcgccctgactcagccggcttcggctagcggttcaccggggcagtccgtgactatctcctgcaccgggacttcctccgacgtgggaggctacaattacgtgtcctggtaccagcaacaccccggcaaagccccaaagctgatgatctacgacgtcagcaacagacccagcggagtgtccaaccggttcagcggctccaagtccggcaacaccgcctccctgaccatcagcgggcttcaggccgaagatgaggcggattactactgctcctcgtacacctcaagctcaactctgtacgtgttcggcaccggtactcagctcaccgtgctgaccactaccccagcaccgaggccacccaccccggctcctaccatcgcctcccagcctctgtccctgcgtccggaggcatgtagacccgcagctggtggggccgtgcatacccggggtcttgacttcgcctgcgatatctacatttgggcccctctggctggtacttgcggggtcctgctgctttcactcgtgatcactctttactgtaagcgcggtcggaagaagctgctgtacatctttaagcaacccttcatgaggcctgtgcagactactcaagaggaggacggctgttcatgccggttcccagaggaggaggaaggcggctgcgaactgcgcgtgaaattcagccgcagcgcagatgctccagcctaccagcaggggcagaaccagctctacaacgaactcaatcttggtcggagagaggagtacgacgtgctggacaagcggagaggacgggacccagaaatgggcgggaagccgcgcagaaagaatccccaagagggcctgtacaacgagctccaaaaggataagatggcagaagcctatagcgagattggtatgaaaggggaacgcagaagaggcaaaggccacgacggactgtaccagggactcagcaccgccaccaaggacacctatgacgctcttcacatgcaggccctgccgcctcggggaagcggagctactaacttcagcctgctgaagcaggctggagacgtggaggagaaccctggacctatggccttaccagtgaccgccttgctcctgccgctggccttgctgctccacgccgccaggccggaaattgtgatgacccagtcacccgccactcttagcctttcacccggtgagcgcgcaaccctgtcttgcagagcctcccaagacatctcaaaataccttaattggtatcaacagaagcccggacaggctcctcgccttctgatctaccacaccagccggctccattctggaatccctgccaggttcagcggtagcggatctgggaccgactacaccctcactatcagctcactgcagccagaggacttcgctgtctatttctgtcagcaagggaacaccctgccctacacctttggacagggcaccaagctcgagattaaaggtggaggtggcagcggaggaggtgggtccggcggtggaggaagccaggtccaactccaagaaagcggaccgggtcttgtgaagccatcagaaactctttcactgacttgtactgtgagcggagtgtctctccccgattacggggtgtcttggatcagacagccaccggggaagggtctggaatggattggagtgatttggggctctgagactacttactaccaatcatccctcaagtcacgcgtcaccatctcaaaggacaactctaagaatcaggtgtcactgaaactgtcatctgtgaccgcagccgacaccgccgtgtactattgcgctaagcattactattatggcgggagctacgcaatggattactggggacagggtactctggtcaccgtgtccagcaccacgacgccagcgccgcgaccaccaacaccggcgcccaccatcgcgtcgcagcccctgtccctgcgcccagaggcgtgccggccagcggcggggggcgcagtgcacacgagggggctggacttcgcctgtgatatctacatctgggcgcccttggccgggacttgtggggtccttctcctgtcactggttatcaccctttactgcaaacggggcagaaagaaactcctgtatatattcaaacaaccatttatgagaccagtacaaactactcaagaggaagatggctgtagctgccgatttccagaagaagaagaaggaggatgtgaactgagagtgaagttcagcaggagcgcagacgcccccgcgtaccagcagggccagaaccagctctataacgagctcaatctaggacgaagagaggagtacgatgttttggacaagagacgtggccgggaccctgagatggggggaaagccgagaaggaagaaccctcaggaaggcctgtacaatgaactgcagaaagataagatggcggaggcctacagtgagattgggatgaaaggcgagcgccggaggggcaaggggcacgatggcctttaccagggtctcagtacagccaccaaggacacctacgacgcccttcacatgcaggccctgccccctcgc

SEQ ID NO: 824 - protein, 995 aa, Artificial Sequence
  Description of Artificial Sequence: Synthetic polypeptide
MALPVTALLLPLALLLHAARPEVQLQQSGPGLVKPSQTLSLTCAISGDSMLSNSDTWNWIRQSPSRGLEWLGRTYHRSTWYDDYASSVRGRVSINVDTSKNQYSLQLNAVTPEDTGVYYCARVRLQDGNSWSDAFDVWGQGTMVTVSSGGGGSQSALTQPASASGSPGQSVTISCTGTSSDVGGYNYVSWYQQHPGKAPKLMIYDVSNRPSGVSNRFSGSKSGNTASLTISGLQAEDEADYYCSSYTSSSTLYVFGTGTQLTVLTTTPAPRPPTPAPTIASQPLSLRPEACRPAAGGAVHTRGLDFACDIYIWAPLAGTCGVLLLSLVITLYCKRGRKKLLYIFKQPFMRPVQTTQEEDGCSCRFPEEEEGGCELRVKFSRSADAPAYQQGQNQLYNELNLGRREEYDVLDKRRGRDPEMGGKPRRKNPQEGLYNELQKDKMAEAYSEIGMKGERRRGKGHDGLYQGLSTATKDTYDALHMQALPPRGSGATNFSLLKQAGDVEENPGPMALPVTALLLPLALLLHAARPEIVMTQSPATLSLSPGERATLSCRASQDISKYLNWYQQKPGQAPRLLIYHTSRLHSGIPARFSGSGSGTDYTLTISSLQPEDFAVYFCQQGNTLPYTFGQGTKLEIKGGGGSGGGGSGGGGSQVQLQESGPGLVKPSETLSLTCTVSGVSLPDYGVSWIRQPPGKGLEWIGVIWGSETTYYQSSLKSRVTISKDNSKNQVSLKLSSVTAADTAVYYCAKHYYYGGSYAMDYWGQGTLVTVSSTTTPAPRPPTPAPTIASQPLSLRPEACRPAAGGAVHTRGLDFACDIYIWAPLAGTCGVLLLSLVITLYCKRGRKKLLYIFKQPFMRPVQTTQEEDGCSCRFPEEEEGGCELRVKFSRSADAPAYQQGQNQLYNELNLGRREEYDVLDKRRGRDPEMGGKPRRKNPQEGLYNELQKDKMAEAYSEIGMKGERRRGKGHDGLYQGLSTATKDTYDALHMQALPPR

SEQ ID NO: 825 - protein, 508 aa, Artificial Sequence
  Description of Artificial Sequence: Synthetic polypeptide
MALPVTALLLPLALLLHAARPEVQLQQSGPGLVKPSQTLSLTCAISGDSMLSNSDTWNWIRQSPSRGLEWLGRTYHRSTWYDDYASSVRGRVSINVDTSKNQYSLQLNAVTPEDTGVYYCARVRLQDGNSWSDAFDVWGQGTMVTVSSGGGGSQSALTQPASASGSPGQSVTISCTGTSSDVGGYNYVSWYQQHPGKAPKLMIYDVSNRPSGVSNRFSGSKSGNTASLTISGLQAEDEADYYCSSYTSSSTLYVFGTGTQLTVLTTTPAPRPPTPAPTIASQPLSLRPEACRPAAGGAVHTRGLDFACDIYIWAPLAGTCGVLLLSLVITLYCKRGRKKLLYIFKQPFMRPVQTTQEEDGCSCRFPEEEEGGCELRVKFSRSADAPAYQQGQNQLYNELNLGRREEYDVLDKRRGRDPEMGGKPRRKNPQEGLYNELQKDKMAEAYSEIGMKGERRRGKGHDGLYQGLSTATKDTYDALHMQALPPRGSGATNFSLLKQAGDVEENPG

SEQ ID NO: 826 - protein, 487 aa, Artificial Sequence
  Description of Artificial Sequence: Synthetic polypeptide
PMALPVTALLLPLALLLHAARPEIVMTQSPATLSLSPGERATLSCRASQDISKYLNWYQQKPGQAPRLLIYHTSRLHSGIPARFSGSGSGTDYTLTISSLQPEDFAVYFCQQGNTLPYTFGQGTKLEIKGGGGSGGGGSGGGGSQVQLQESGPGLVKPSETLSLTCTVSGVSLPDYGVSWIRQPPGKGLEWIGVIWGSETTYYQSSLKSRVTISKDNSKNQVSLKLSSVTAADTAVYYCAKHYYYGGSYAMDYWGQGTLVTVSSTTTPAPRPPTPAPTIASQPLSLRPEACRPAAGGAVHTRGLDFACDIYIWAPLAGTCGVLLLSLVITLYCKRGRKKLLYIFKQPFMRPVQTTQEEDGCSCRFPEEEEGGCELRVKFSRSADAPAYQQGQNQLYNELNLGRREEYDVLDKRRGRDPEMGGKPRRKNPQEGLYNELQKDKMAEAYSEIGMKGERRRGKGHDGLYQGLSTATKDTYDALHMQALPPR

SEQ ID NO: 827 - DNA, 2985 bp, Artificial Sequence
  Description of Artificial Sequence: Synthetic polynucleotide
atggccttaccagtgaccgccttgctcctgccgctggccttgctgctccacgccgccaggccggaaattgtgatgacccagtcacccgccactcttagcctttcacccggtgagcgcgcaaccctgtcttgcagagcctcccaagacatctcaaaataccttaattggtatcaacagaagcccggacaggctcctcgccttctgatctaccacaccagccggctccattctggaatccctgccaggttcagcggtagcggatctgggaccgactacaccctcactatcagctcactgcagccagaggacttcgctgtctatttctgtcagcaagggaacaccctgccctacacctttggacagggcaccaagctcgagattaaaggtggaggtggcagcggaggaggtgggtccggcggtggaggaagccaggtccaactccaagaaagcggaccgggtcttgtgaagccatcagaaactctttcactgacttgtactgtgagcggagtgtctctccccgattacggggtgtcttggatcagacagccaccggggaagggtctggaatggattggagtgatttggggctctgagactacttactaccaatcatccctcaagtcacgcgtcaccatctcaaaggacaactctaagaatcaggtgtcactgaaactgtcatctgtgaccgcagccgacaccgccgtgtactattgcgctaagcattactattatggcgggagctacgcaatggattactggggacagggtactctggtcaccgtgtccagcaccacgacgccagcgccgcgaccaccaacaccggcgcccaccatcgcgtcgcagcccctgtccctgcgcccagaggcgtgccggccagcggcggggggcgcagtgcacacgagggggctggacttcgcctgtgatatctacatctgggcgcccttggccgggacttgtggggtccttctcctgtcactggttatcaccctttactgcaaacggggcagaaagaaactcctgtatatattcaaacaaccatttatgagaccagtacaaactactcaagaggaagatggctgtagctgccgatttccagaagaagaagaaggaggatgtgaactgagagtgaagttcagcaggagcgcagacgcccccgcgtaccagcagggccagaaccagctctataacgagctcaatctaggacgaagagaggagtacgatgttttggacaagagacgtggccgggaccctgagatggggggaaagccgagaaggaagaaccctcaggaaggcctgtacaatgaactgcagaaagataagatggcggaggcctacagtgagattgggatgaaaggcgagcgccggaggggcaaggggcacgatggcctttaccagggtctcagtacagccaccaaggacacctacgacgcccttcacatgcaggccctgccccctcgcggaagcggagctactaacttcagcctgctgaagcaggctggagacgtggaggagaaccctggacctatggccctccctgtcaccgccctgctgcttccgctggctcttctgctccacgccgctcggcccgaagtgcagctgcagcagtcagggcctggcctggtcaagccgtcgcagaccctctccctgacatgcgccattagcggggactccatgctgagcaactcggacacctggaactggattcggcagtccccttcccggggactcgagtggctcggacgcacctaccatcggagcacttggtacgacgactacgcctcctccgtgagaggtcgcgtgtcgatcaacgtggatacctcgaagaaccagtatagcttgcaactgaacgccgtgacccctgaggataccggagtgtactattgtgcgagagtcaggctgcaagacggaaactcctggtccgacgcatttgatgtctggggacagggtactatggtcacggtgtcatctggaggcggaggatcgcaaagcgccctgactcagccggcttcggctagcggttcaccggggcagtccgtgactatctcctgcaccgggacttcctccgacgtgggaggctacaattacgtgtcctggtaccagcaacaccccggcaaagccccaaagctgatgatctacgacgtcagcaacagacccagcggagtgtccaaccggttcagcggctccaagtccggcaacaccgcctccctgaccatcagcgggcttcaggccgaagatgaggcggattactactgctcctcgtacacctcaagctcaactctgtacgtgttcggcaccggtactcagctcaccgtgctgaccactaccccagcaccgaggccacccaccccggctcctaccatcgcctcccagcctctgtccctgcgtccggaggcatgtagacccgcagctggtggggccgtgcatacccggggtcttgacttcgcctgcgatatctacatttgggcccctctggctggtacttgcggggtcctgctgctttcactcgtgatcactctttactgtaagcgcggtcggaagaagctgctgtacatctttaagcaacccttcatgaggcctgtgcagactactcaagaggaggacggctgttcatgccggttcccagaggaggaggaaggcggctgcgaactgcgcgtgaaattcagccgcagcgcagatgctccagcctaccagcaggggcagaaccagctctacaacgaactcaatcttggtcggagagaggagtacgacgtgctggacaagcggagaggacgggacccagaaatgggcgggaagccgcgcagaaagaatccccaagagggcctgtacaacgagctccaaaaggataagatggcagaagcctatagcgagattggtatgaaaggggaacgcagaagaggcaaaggccacgacggactgtaccagggactcagcaccgccaccaaggacacctatgacgctcttcacatgcaggccctgccgcctcgg

SEQ ID NO: 828 - protein, 995 aa, Artificial Sequence
  Description of Artificial Sequence: Synthetic polypeptide
MALPVTALLLPLALLLHAARPEIVMTQSPATLSLSPGERATLSCRASQDISKYLNWYQQKPGQAPRLLIYHTSRLHSGIPARFSGSGSGTDYTLTISSLQPEDFAVYFCQQGNTLPYTFGQGTKLEIKGGGGSGGGGSGGGGSQVQLQESGPGLVKPSETLSLTCTVSGVSLPDYGVSWIRQPPGKGLEWIGVIWGSETTYYQSSLKSRVTISKDNSKNQVSLKLSSVTAADTAVYYCAKHYYYGGSYAMDYWGQGTLVTVSSTTTPAPRPPTPAPTIASQPLSLRPEACRPAAGGAVHTRGLDFACDIYIWAPLAGTCGVLLLSLVITLYCKRGRKKLLYIFKQPFMRPVQTTQEEDGCSCRFPEEEEGGCELRVKFSRSADAPAYQQGQNQLYNELNLGRREEYDVLDKRRGRDPEMGGKPRRKNPQEGLYNELQKDKMAEAYSEIGMKGERRRGKGHDGLYQGLSTATKDTYDALHMQALPPRGSGATNFSLLKQAGDVEENPGPMALPVTALLLPLALLLHAARPEVQLQQSGPGLVKPSQTLSLTCAISGDSMLSNSDTWNWIRQSPSRGLEWLGRTYHRSTWYDDYASSVRGRVSINVDTSKNQYSLQLNAVTPEDTGVYYCARVRLQDGNSWSDAFDVWGQGTMVTVSSGGGGSQSALTQPASASGSPGQSVTISCTGTSSDVGGYNYVSWYQQHPGKAPKLMIYDVSNRPSGVSNRFSGSKSGNTASLTISGLQAEDEADYYCSSYTSSSTLYVFGTGTQLTVLTTTPAPRPPTPAPTIASQPLSLRPEACRPAAGGAVHTRGLDFACDIYIWAPLAGTCGVLLLSLVITLYCKRGRKKLLYIFKQPFMRPVQTTQEEDGCSCRFPEEEEGGCELRVKFSRSADAPAYQQGQNQLYNELNLGRREEYDVLDKRRGRDPEMGGKPRRKNPQEGLYNELQKDKMAEAYSEIGMKGERRRGKGHDGLYQGLSTATKDTYDALHMQALPPR

SEQ ID NO: 829 - protein, 507 aa, Artificial Sequence
  Description of Artificial Sequence: Synthetic polypeptide
MALPVTALLLPLALLLHAARPEIVMTQSPATLSLSPGERATLSCRASQDISKYLNWYQQKPGQAPRLLIYHTSRLHSGIPARFSGSGSGTDYTLTISSLQPEDFAVYFCQQGNTLPYTFGQGTKLEIKGGGGSGGGGSGGGGSQVQLQESGPGLVKPSETLSLTCTVSGVSLPDYGVSWIRQPPGKGLEWIGVIWGSETTYYQSSLKSRVTISKDNSKNQVSLKLSSVTAADTAVYYCAKHYYYGGSYAMDYWGQGTLVTVSSTTTPAPRPPTPAPTIASQPLSLRPEACRPAAGGAVHTRGLDFACDIYIWAPLAGTCGVLLLSLVITLYCKRGRKKLLYIFKQPFMRPVQTTQEEDGCSCRFPEEEEGGCELRVKFSRSADAPAYQQGQNQLYNELNLGRREEYDVLDKRRGRDPEMGGKPRRKNPQEGLYNELQKDKMAEAYSEIGMKGERRRGKGHDGLYQGLSTATKDTYDALHMQALPPRGSGATNFSLLKQAGDVEENPG

SEQ ID NO: 830 - protein, 488 aa, Artificial Sequence
  Description of Artificial Sequence: Synthetic polypeptide
PMALPVTALLLPLALLLHAARPEVQLQQSGPGLVKPSQTLSLTCAISGDSMLSNSDTWNWIRQSPSRGLEWLGRTYHRSTWYDDYASSVRGRVSINVDTSKNQYSLQLNAVTPEDTGVYYCARVRLQDGNSWSDAFDVWGQGTMVTVSSGGGGSQSALTQPASASGSPGQSVTISCTGTSSDVGGYNYVSWYQQHPGKAPKLMIYDVSNRPSGVSNRFSGSKSGNTASLTISGLQAEDEADYYCSSYTSSSTLYVFGTGTQLTVLTTTPAPRPPTPAPTIASQPLSLRPEACRPAAGGAVHTRGLDFACDIYIWAPLAGTCGVLLLSLVITLYCKRGRKKLLYIFKQPFMRPVQTTQEEDGCSCRFPEEEEGGCELRVKFSRSADAPAYQQGQNQLYNELNLGRREEYDVLDKRRGRDPEMGGKPRRKNPQEGLYNELQKDKMAEAYSEIGMKGERRRGKGHDGLYQGLSTATKDTYDALHMQALPPR

SEQ ID NO: 831 - DNA, 2985 bp, Artificial Sequence
  Description of Artificial Sequence: Synthetic polynucleotide
atggcacttcccgtcaccgccctgctgctcccactcgccctccttctgcacgccgcccgccccgaagtgcagctgcagcagtcaggaccgggcctggtcaaaccttcgcagactctgtccctgacttgcgctataagcggggactccatgctgagcaattcggacacttggaactggattcgccaaagccccagccggggtctggaatggctgggaaggacctaccatcgctctacttggtacgacgactacgccagctccgtgcgaggacgcgtgtccatcaacgtggacacctccaagaaccagtactcgcttcaactcaacgcagtgacccctgaagataccggagtctactattgcgcccgcgtgcggctccaggacgggaactcctggtcggacgctttcgatgtctggggacagggcactatggtcaccgtcagctccggcggcggcggtagccaatcggcgctgacacagccggcttccgcctcgggatcgcctggacagtcggtgaccatctcgtgcactggaacctcctccgacgtgggcggctacaattatgtgtcatggtaccagcagcacccgggaaaggcccctaagctgatgatctacgacgtgtccaatagacctagcggggtgtcaaacagattctccggatccaaatccggaaacactgcctccctgaccatttccggactgcaggccgaggacgaagccgattactactgctcctcttacacctcctcatccaccctctacgtgtttgggactgggacccagctgaccgtcctcactaccaccccggccccgcggccccctacaccggcaccgactattgccagccagcctctctcgctgcggccggaggcctgccgcccagccgccggcggagccgtgcacacccgcggtctggacttcgcgtgcgatatctacatctgggctccgctggccgggacttgtggcgtgctgctgctgtctctggtcatcacactgtactgcaagcgcggaagaaagaagctgctctacatcttcaagcaacccttcatgcggcctgtgcagaccacccaggaagaggatggctgctcctgccggttcccggaggaagaagagggcggatgcgaactgcgcgtgaagttcagccgaagcgccgacgccccggcctaccagcagggccagaaccaactgtacaacgaactcaacctgggtcggagagaagagtacgacgtgctggacaaaagacgcggcagggaccccgagatgggcggaaagcctcgccgcaagaacccgcaggagggcctctacaacgagctgcagaaggacaagatggccgaagcctactcagagatcggcatgaagggggagcggaggcgcgggaagggccacgacggtttgtaccaaggactttccactgcgaccaaggacacctacgatgccctccatatgcaagccctgccgccccggggttccggagctaccaacttctcgctgttgaagcaggccggagatgtcgaggaaaacccgggacctatggccctgccagtgaccgcgctcctgctgcccctggctctgctgcttcacgcggcccggcctgagattgtgatgactcagagcccggcgaccctgtccctgtcccccggggagagagcaaccctgtcgtgccgggcctcccaagacatctcaaagtacctcaattggtatcagcagaagccaggacaggctccacggttgctgatctaccacacttcgagactgcactcaggaatccccgcgcggttttccggttccggctccgggaccgactacaccctgaccatcagctcgctccagcctgaggatttcgcagtgtacttctgtcagcaaggaaacacccttccatacaccttcggacagggtaccaagctggaaatcaagggaggaggaggatctgggggcggtggttccggaggcggtggaagccaagtgcagctccaggaaagcggacccgggctggtcaagccgagcgaaaccctctcactgacttgtactgtgtccggagtgtccctgcctgactatggagtgtcctggatccgacagccccccggaaagggtctggagtggattggggtcatctggggctccgaaactacctactaccagagcagcctcaagagccgggtcaccatttcaaaggataactccaagaatcaagtgtccctgaagctgtcctcagtgacagccgcagacaccgccgtgtactactgcgccaagcactactactacggaggctcctacgcaatggactactggggacaaggcactttggtcactgtgtcaagcaccaccacccctgcgcctcggcctcctaccccggctcccactatcgcgagccagccgctgagcctgcggcctgaggcttgccgaccggccgctggcggcgccgtgcatactcggggcctcgactttgcctgtgacatctacatctgggcccccctggccggaacgtgcggagtgctgctgctgtcgctggtcattaccctgtattgcaaacgcggaaggaagaagctgttgtacattttcaagcagcccttcatgcgcccggtgcaaactactcaggaggaagatggctgttcctgtcggttccccgaagaggaagaaggcggctgcgagttgagggtcaagttctcccggtccgccgatgctcccgcctaccaacaggggcagaaccagctttataacgaactgaacctgggcaggagggaggaatatgatgtgttggataagcgccggggccgggacccagaaatggggggaaagcccagaagaaagaaccctcaagagggactttacaacgaattgcagaaagacaaaatggccgaggcctactccgagattgggatgaagggcgaaagacggagaggaaaggggcacgacgggctctaccagggactcagcaccgccaccaaagatacctacgacgccctgcatatgcaggcgctgccgccgcgc

SEQ ID NO: 832 - protein, 9 aa, Artificial Sequence
  Description of Artificial Sequence: Synthetic peptide
GDSMLSNSD

SEQ ID NO: 833 - protein, 7 aa, Artificial Sequence
  Description of Artificial Sequence: Synthetic peptide
YHRSTWY

SEQ ID NO: 834 - protein, 10 aa, Artificial Sequence
  Description of Artificial Sequence: Synthetic peptide
GDSMLSNSDT

SEQ ID NO: 835 - protein, 9 aa, Artificial Sequence
  Description of Artificial Sequence: Synthetic peptide
TYHRSTWYD

SEQ ID NO: 836 - protein, 17 aa, Artificial Sequence
  Description of Artificial Sequence: Synthetic peptide
ARVRLQDGNSWSDAFDV

SEQ ID NO: 837 - protein, 10 aa, Artificial Sequence
  Description of Artificial Sequence: Synthetic peptide
GVSLPDYGVS

SEQ ID NO: 838 - protein, 16 aa, Artificial Sequence
  Description of Artificial Sequence: Synthetic peptide
VIWGSETTYYSSSLKS

SEQ ID NO: 839 - protein, 16 aa, Artificial Sequence
  Description of Artificial Sequence: Synthetic peptide
VIWGSETTYYNSSLKS

SEQ ID NO: 840 - DNA, 726 bp, Artificial Sequence
  Description of Artificial Sequence: Synthetic polynucleotide
gaaattgtgatgacccagtcacccgccactcttagcctttcacccggtgagcgcgcaaccctgtcttgcagagcctcccaagacatctcaaaataccttaattggtatcaacagaagcccggacaggctcctcgccttctgatctaccacaccagccggctccattctggaatccctgccaggttcagcggtagcggatctgggaccgactacaccctcactatcagctcactgcagccagaggacttcgctgtctatttctgtcagcaagggaacaccctgccctacacctttggacagggcaccaagctcgagattaaaggtggaggtggcagcggaggaggtgggtccggcggtggaggaagccaggtccaactccaagaaagcggaccgggtcttgtgaagccatcagaaactctttcactgacttgtactgtgagcggagtgtctctccccgattacggggtgtcttggatcagacagccaccggggaagggtctggaatggattggagtgatttggggctctgagactacttactaccaatcatccctcaagtcacgcgtcaccatctcaaaggacaactctaagaatcaggtgtcactgaaactgtcatctgtgaccgcagccgacaccgccgtgtactattgcgctaagcattactattatggcgggagctacgcaatggattactggggacagggtactctggtcaccgtgtccagc

SEQ ID NO: 841 - DNA, 726 bp, Artificial Sequence
  Description of Artificial Sequence: Synthetic polynucleotide
gagattgtcatgactcagtccccggccacactctccctgtcacccggagaaagagcaaccctgagctgcagggcgtcccaggacatctcgaagtacctgaactggtaccagcagaagcctggacaagcaccccgcctcctgatctaccacacctcgcggctgcattcgggaatccccgccagattctcagggagcggatcaggaaccgactacaccctgactatctcgagcctgcaaccagaggatttcgccgtgtacttctgccagcaaggaaacaccctgccctacacctttggacagggaaccaagctcgagattaaggggggtggtggatcgggagggggtggatcaggaggaggcggctcacaagtccagctgcaagaatccggtccgggacttgtgaagccgtccgaaaccctgtcactgacttgcactgtgtccggggtgtcattgcccgactacggcgtgagctggattcggcagccccctggaaagggattggaatggatcggcgtgatctggggttcggaaactacctactatcagtcctcactgaagtcccgcgtgaccatcagcaaggataattccaaaaaccaagtgtctctgaagctctccagcgtcactgccgccgatactgccgtgtactactgcgccaagcactactattacggcggttcgtacgccatggactactggggccaagggacactcgtgaccgtgtcatcc

SEQ ID NO: 842 - DNA, 726 bp, Artificial Sequence
  Description of Artificial Sequence: Synthetic polynucleotide
caagtccagctgcaagaatccggtccgggacttgtgaagccgtccgaaaccctgtcactgacttgcactgtgtccggggtgtcattgcccgactacggcgtgagctggattcggcagccccctggaaagggattggaatggatcggcgtgatctggggttcggaaactacctactatcagtcctcactgaagtcccgcgtgaccatcagcaaggataattccaaaaaccaagtgtctctgaagctctccagcgtcactgccgccgatactgccgtgtactactgcgccaagcactactattacggcggttcgtacgccatggactactggggacaaggcactcttgtgactgtgtcaagcggcggtggagggagcggtgggggcggttcaggaggaggcggatcagagatcgtgatgacccaatccccagccaccctgtccctcagccctggagaaagagccaccctgagctgccgggcctcccaggatatcagcaagtacttgaactggtaccaacaaaagccggggcaggcgccccggctcctgatctaccacacctcgcgcctccactcaggtatccccgccagattctcagggagcggctccggtactgactacaccctgactatttcctcactgcagccagaggactttgccgtgtacttctgccagcagggaaacactctgccgtacaccttcgggcagggaacgaagcttgaaattaag

SEQ ID NO: 843 - protein, 242 aa, Artificial Sequence
  Description of Artificial Sequence: Synthetic polypeptide
QVQLQESGPGLVKPSETLSLTCTVSGVSLPDYGVSWIRQPPGKGLEWIGVIWGSETTYYQSSLKSRVTISKDNSKNQVSLKLSSVTAADTAVYYCAKHYYYGGSYAMDYWGQGTLVTVSSGGGGSGGGGSGGGGSEIVMTQSPATLSLSPGERATLSCRASQDISKYLNWYQQKPGQAPRLLIYHTSRLHSGIPARFSGSGSGTDYTLTISSLQPEDFAVYFCQQGNTLPYTFGQGTKLEIK

SEQ ID NO: 844 - DNA, 726 bp, Artificial Sequence
  Description of Artificial Sequence: Synthetic polynucleotide
gagattgtgatgactcagagcccggcgaccctgtccctgtcccccggggagagagcaaccctgtcgtgccgggcctcccaagacatctcaaagtacctcaattggtatcagcagaagccaggacaggctccacggttgctgatctaccacacttcgagactgcactcaggaatccccgcgcggttttccggttccggctccgggaccgactacaccctgaccatcagctcgctccagcctgaggatttcgcagtgtacttctgtcagcaaggaaacacccttccatacaccttcggacagggtaccaagctggaaatcaagggaggaggaggatctgggggcggtggttccggaggcggtggaagccaagtgcagctccaggaaagcggacccgggctggtcaagccgagcgaaaccctctcactgacttgtactgtgtccggagtgtccctgcctgactatggagtgtcctggatccgacagccccccggaaagggtctggagtggattggggtcatctggggctccgaaactacctactaccagagcagcctcaagagccgggtcaccatttcaaaggataactccaagaatcaagtgtccctgaagctgtcctcagtgacagccgcagacaccgccgtgtactactgcgccaagcactactactacggaggctcctacgcaatggactactggggacaaggcactttggtcactgtgtcaagc

SEQ ID NO: 845 - DNA, 729 bp, Artificial Sequence
  Description of Artificial Sequence: Synthetic polynucleotide
gaagtgcagctgcagcagtcagggcctggcctggtcaagccgtcgcagaccctctccctgacatgcgccattagcggggactccatgctgagcaactcggacacctggaactggattcggcagtccccttcccggggactcgagtggctcggacgcacctaccatcggagcacttggtacgacgactacgcctcctccgtgagaggtcgcgtgtcgatcaacgtggatacctcgaagaaccagtatagcttgcaactgaacgccgtgacccctgaggataccggagtgtactattgtgcgagagtcaggctgcaagacggaaactcctggtccgacgcatttgatgtctggggacagggtactatggtcacggtgtcatctggaggcggaggatcgcaaagcgccctgactcagccggcttcggctagcggttcaccggggcagtccgtgactatctcctgcaccgggacttcctccgacgtgggaggctacaattacgtgtcctggtaccagcaacaccccggcaaagccccaaagctgatgatctacgacgtcagcaacagacccagcggagtgtccaaccggttcagcggctccaagtccggcaacaccgcctccctgaccatcagcgggcttcaggccgaagatgaggcggattactactgctcctcgtacacctcaagctcaactctgtacgtgttcggcaccggtactcagctcaccgtgctg

SEQ ID NO: 846 - protein, 243 aa, Artificial Sequence
  Description of Artificial Sequence: Synthetic polypeptide
EVQLQQSGPGLVKPSQTLSLTCAISGDSMLSNSDTWNWIRQSPSRGLEWLGRTYHRSTWYDDYASSVRGRVSINVDTSKNQYSLQLNAVTPEDTGVYYCARVRLQDGNSWSDAFDVWGQGTMVTVSSGGGGSQSALTQPASASGSPGQSVTISCTGTSSDVGGYNYVSWYQQHPGKAPKLMIYDVSNRPSGVSNRFSGSKSGNTASLTISGLQAEDEADYYCSSYTSSSTLYVFGTGTQLTVL

SEQ ID NO: 847 - DNA, 729 bp, Artificial Sequence
  Description of Artificial Sequence: Synthetic polynucleotide
gaagtgcagctgcagcagtcaggaccgggcctggtcaaaccttcgcagactctgtccctgacttgcgctataagcggggactccatgctgagcaattcggacacttggaactggattcgccaaagccccagccggggtctggaatggctgggaaggacctaccatcgctctacttggtacgacgactacgccagctccgtgcgaggacgcgtgtccatcaacgtggacacctccaagaaccagtactcgcttcaactcaacgcagtgacccctgaagataccggagtctactattgcgcccgcgtgcggctccaggacgggaactcctggtcggacgctttcgatgtctggggacagggcactatggtcaccgtcagctccggcggcggcggtagccaatcggcgctgacacagccggcttccgcctcgggatcgcctggacagtcggtgaccatctcgtgcactggaacctcctccgacgtgggcggctacaattatgtgtcatggtaccagcagcacccgggaaaggcccctaagctgatgatctacgacgtgtccaatagacctagcggggtgtcaaacagattctccggatccaaatccggaaacactgcctccctgaccatttccggactgcaggccgaggacgaagccgattactactgctcctcttacacctcctcatccaccctctacgtgtttgggactgggacccagctgaccgtcctc

SEQ ID NO: 848 - DNA, 759 bp, Artificial Sequence
  Description of Artificial Sequence: Synthetic polynucleotide
gaagtgcagcttcaacaatcaggaccaggactcgtcaaaccatcacagaccctctccctcacatgtgccatctccggggactccatgttgagcaattccgacacttggaattggattagacaaagcccgtcccggggtctggaatggttgggacgcacctaccaccggtctacttggtacgacgactacgcgtcatccgtgcggggaagagtgtccatcaacgtggacacctccaagaaccagtacagcctgcagcttaatgccgtgactcctgaggatacgggcgtctactactgcgcccgcgtccgcctgcaagacgggaacagctggagcgatgcattcgatgtctggggccagggaactatggtcaccgtgtcgtctgggggcggtggatcgggtggcgggggttcggggggcggcggctctcagtccgctcttacccaaccggcctcagcctcggggagccccggccagagcgtgaccatttcctgcaccggcacttcatccgacgtgggcggctacaactacgtgtcctggtaccaacagcacccgggaaaggcccccaagctcatgatctacgacgtgtccaacaggccctcgggagtgtccaaccggttctcgggttcgaaatcgggaaacacagccagcctgaccatcagcggactgcaggctgaagatgaagccgactactactgctcctcctacacctcgtcatccacgctctacgtgttcggcactggaactcagctgactgtgctg

SEQ ID NO: 849 - DNA, 729 bp, Artificial Sequence
  Description of Artificial Sequence: Synthetic polynucleotide
cagtccgctcttacccaaccggcctcagcctcggggagccccggccagagcgtgaccatttcctgcaccggcacttcatccgacgtgggcggctacaactacgtgtcctggtaccaacagcacccgggaaaggcccccaagctcatgatctacgacgtgtccaacaggccctcgggagtgtccaaccggttctcgggttcgaaatcgggaaacacagccagcctgaccatcagcggactgcaggctgaagatgaagccgactactactgctcctcctacacctcgtcatccacgctctacgtgttcggcactggaactcagctgactgtgctgggcggaggaggctccgaagtgcagcttcaacaatcaggaccaggactcgtcaaaccatcacagaccctctccctcacatgtgccatctccggggactccatgttgagcaattccgacacttggaattggattagacaaagcccgtcccggggtctggaatggttgggacgcacctaccaccggtctacttggtacgacgactacgcgtcatccgtgcggggaagagtgtccatcaacgtggacacctccaagaaccagtacagcctgcagcttaatgccgtgactcctgaggatacgggcgtctactactgcgcccgcgtccgcctgcaagacgggaacagctggagcgatgcattcgatgtctggggccagggaactatggtcaccgtgtcgtct

SEQ ID NO: 850 - protein, 243 aa, Artificial Sequence
  Description of Artificial Sequence: Synthetic polypeptide
QSALTQPASASGSPGQSVTISCTGTSSDVGGYNYVSWYQQHPGKAPKLMIYDVSNRPSGVSNRFSGSKSGNTASLTISGLQAEDEADYYCSSYTSSSTLYVFGTGTQLTVLGGGGSEVQLQQSGPGLVKPSQTLSLTCAISGDSMLSNSDTWNWIRQSPSRGLEWLGRTYHRSTWYDDYASSVRGRVSINVDTSKNQYSLQLNAVTPEDTGVYYCARVRLQDGNSWSDAFDVWGQGTMVTVSS

SEQ ID NO: 851 - DNA, 729 bp, Artificial Sequence
  Description of Artificial Sequence: Synthetic polynucleotide
cagtccgctctgactcagccggcctcagcttcggggtcccctggtcaaagcgtcactatttcctgtaccggaacctcatcagacgtgggcggctacaattacgtgtcctggtaccaacagcaccccggaaaggctcctaagcttatgatctacgacgtgtccaaccggccgtcaggagtgtccaacagattctccggctccaagagcggaaacactgccagcttgaccattagcggcttgcaggccgaggacgaagccgactactactgctctagctacacatcctcgtctaccctctacgtgtttggaacggggacccagctgactgtgctcgggggtggaggatcagaggtgcaactccagcagtccggtcctggcctcgtgaaaccgtcccaaaccctgtccctgacttgcgccatctcgggcgactccatgctgtccaattccgacacctggaactggattagacaatcgcctagccggggactcgaatggctgggccggacctaccaccggtccacgtggtatgacgactacgcaagctccgtccggggaagggtgtccattaacgtcgatacctccaagaaccagtacagccttcagctgaacgctgtgacccccgaggataccggcgtctactactgtgcaagagtgcgattgcaggatggaaactcgtggtcggacgcattcgatgtctggggacagggaactatggtgaccgtgtcctcg

SEQ ID NO: 852 - DNA, 729 bp, Artificial Sequence
  Description of Artificial Sequence: Synthetic polynucleotide
cagtccgctctgactcagccggcctcagcttcggggtcccctggtcaaagcgtcactatttcctgtaccggaacctcatcagacgtgggcggctacaattacgtgtcctggtaccaacagcaccccggaaaggctcctaagcttatgatctacgacgtgtccaaccggccgtcaggagtgtccaacagattctccggctccaagagcggaaacactgccagcttgaccattagcggcttgcaggccgaggacgaagccgactactactgctctagctacacatcctcgtctaccctctacgtgtttggaacggggacccagctgactgtgctcgggggtggaggatcagaggtgcaactccagcagtccggtcctggcctcgtgaaaccgtcccaaaccctgtccctgacttgcgccatctcgggcgactccatgctgtccaattccgacacctggaactggattagacaatcgcctagccggggactcgaatggctgggccggacctaccaccggtccacgtggtatgacgactacgcaagctccgtccggggaagggtgtccattaacgtcgatacctccaagaaccagtacagccttcagctgaacgctgtgacccccgaggataccggcgtctactactgtgcaagagtgcgattgcaggatggaaactcgtggtcggacgcattcgatgtctggggacagggaactatggtcactgtgtcctcc

SEQ ID NO: 853 - DNA, 63 bp, Artificial Sequence
  Description of Artificial Sequence: Synthetic oligonucleotide
atggccctccctgtcaccgccctgctgcttccgctggctcttctgctccacgccgctcggccc

SEQ ID NO: 854 - DNA, 63 bp, Artificial Sequence
  Description of Artificial Sequence: Synthetic oligonucleotide
atggccctgcccgtgactgcgctcctgcttccgttggccctgctcctgcatgccgccagacct

SEQ ID NO: 855 - DNA, 63 bp, Artificial Sequence
  Description of Artificial Sequence: Synthetic oligonucleotide
atggccttaccagtgaccgccttgctcctgccgctggccttgctgctccacgccgccaggccg

SEQ ID NO: 856 - DNA, 63 bp, Artificial Sequence
  Description of Artificial Sequence: Synthetic oligonucleotide
atggcacttcccgtcaccgccctgctgctcccactcgccctccttctgcacgccgcccgcccc

SEQ ID NO: 857 - DNA, 63 bp, Artificial Sequence
  Description of Artificial Sequence: Synthetic oligonucleotide
atggccctgccagtgaccgcgctcctgctgcccctggctctgctgcttcacgcggcccggcct

SEQ ID NO: 858 - DNA, 207 bp, Artificial Sequence
  Description of Artificial Sequence: Synthetic polynucleotide
accactaccccagcaccgaggccacccaccccggctcctaccatcgcctcccagcctctgtccctgcgtccggaggcatgtagacccgcagctggtggggccgtgcatacccggggtcttgacttcgcctgcgatatctacatttgggcccctctggctggtacttgcggggtcctgctgctttcactcgtgatcactctttactgt

SEQ ID NO: 859 - DNA, 207 bp, Artificial Sequence
  Description of Artificial Sequence: Synthetic polynucleotide
actaccaccccggccccgcggccccctacaccggcaccgactattgccagccagcctctctcgctgcggccggaggcctgccgcccagccgccggcggagccgtgcacacccgcggtctggacttcgcgtgcgatatctacatctgggctccgctggccgggacttgtggcgtgctgctgctgtctctggtcatcacactgtactgc

SEQ ID NO: 860 - DNA, 207 bp, Artificial Sequence
  Description of Artificial Sequence: Synthetic polynucleotide
accacgacgccagcgccgcgaccaccaacaccggcgcccaccatcgcgtcgcagcccctgtccctgcgcccagaggcgtgccggccagcggcggggggcgcagtgcacacgagggggctggacttcgcctgtgatatctacatctgggcgcccttggccgggacttgtggggtccttctcctgtcactggttatcaccctttactgc

SEQ ID NO: 861 - DNA, 207 bp, Artificial Sequence
  Description of Artificial Sequence: Synthetic polynucleotide
accaccacccctgcgcctcggcctcctaccccggctcccactatcgcgagccagccgctgagcctgcggcctgaggcttgccgaccggccgctggcggcgccgtgcatactcggggcctcgactttgcctgtgacatctacatctgggcccccctggccggaacgtgcggagtgctgctgctgtcgctggtcattaccctgtattgc

SEQ ID NO: 862 - DNA, 126 bp, Artificial Sequence
  Description of Artificial Sequence: Synthetic polynucleotide
aagcgcggtcggaagaagctgctgtacatctttaagcaacccttcatgaggcctgtgcagactactcaagaggaggacggctgttcatgccggttcccagaggaggaggaaggcggctgcgaactg

SEQ ID NO: 863 - DNA, 126 bp, Artificial Sequence
  Description of Artificial Sequence: Synthetic polynucleotide
aagcgcggaagaaagaagctgctctacatcttcaagcaacccttcatgcggcctgtgcagaccacccaggaagaggatggctgctcctgccggttcccggaggaagaagagggcggatgcgaactg

SEQ ID NO: 864 - DNA, 126 bp, Artificial Sequence
  Description of Artificial Sequence: Synthetic polynucleotide
aaacgcggaaggaagaagctgttgtacattttcaagcagcccttcatgcgcccggtgcaaactactcaggaggaagatggctgttcctgtcggttccccgaagaggaagaaggcggctgcgagttg

SEQ ID NO: 865 - DNA, 336 bp, Artificial Sequence
  Description of Artificial Sequence: Synthetic polynucleotide
cgcgtgaaattcagccgcagcgcagatgctccagcctaccagcaggggcagaaccagctctacaacgaactcaatcttggtcggagagaggagtacgacgtgctggacaagcggagaggacgggacccagaaatgggcgggaagccgcgcagaaagaatccccaagagggcctgtacaacgagctccaaaaggataagatggcagaagcctatagcgagattggtatgaaaggggaacgcagaagaggcaaaggccacgacggactgtaccagggactcagcaccgccaccaaggacacctatgacgctcttcacatgcaggccctgccgcctcgg

SEQ ID NO: 866 - DNA, 336 bp, Artificial Sequence
  Description of Artificial Sequence: Synthetic polynucleotide
cgcgtgaagttcagccgaagcgccgacgccccggcctaccagcagggccagaaccaactgtacaacgaactcaacctgggtcggagagaagagtacgacgtgctggacaaaagacgcggcagggaccccgagatgggcggaaagcctcgccgcaagaacccgcaggagggcctctacaacgagctgcagaaggacaagatggccgaagcctactcagagatcggcatgaagggggagcggaggcgcgggaagggccacgacggtttgtaccaaggactttccactgcgaccaaggacacctacgatgccctccatatgcaagccctgccgccccgg

SEQ ID NO: 867 - DNA, 336 bp, Artificial Sequence
  Description of Artificial Sequence: Synthetic polynucleotide
agggtcaagttctcccggtccgccgatgctcccgcctaccaacaggggcagaaccagctttataacgaactgaacctgggcaggagggaggaatatgatgtgttggataagcgccggggccgggacccagaaatggggggaaagcccagaagaaagaaccctcaagagggactttacaacgaattgcagaaagacaaaatggccgaggcctactccgagattgggatgaagggcgaaagacggagaggaaaggggcacgacgggctctaccagggactcagcaccgccaccaaagatacctacgacgccctgcatatgcaggcgctgccgccgcgc

SEQ ID NO: 868 - DNA, 21 bp, Artificial Sequence
  Description of Artificial Sequence: Synthetic oligonucleotide
ttggcagaagccgccgcgaaa

SEQ ID NO: 869 - protein, 7 aa, Artificial Sequence
  Description of Artificial Sequence: Synthetic peptide
LAEAAAK

SEQ ID NO: 870 - DNA, 45 bp, Artificial Sequence
  Description of Artificial Sequence: Synthetic oligonucleotide
ggtggaggtggcagcggaggaggtgggtccggcggtggaggaagc

SEQ ID NO: 871 - DNA, 45 bp, Artificial Sequence
  Description of Artificial Sequence: Synthetic oligonucleotide
ggcggaggcgggagcggaggaggaggctctggcggaggaggaagc

SEQ ID NO: 872 - DNA, 45 bp, Artificial Sequence
  Description of Artificial Sequence: Synthetic oligonucleotide
ggcggtggaggctcgggggggggcggctcaggaggaggcggctca

SEQ ID NO: 873 - DNA, 66 bp, Artificial Sequence
  Description of Artificial Sequence: Synthetic oligonucleotide
ggaagcggagctactaacttcagcctgctgaagcaggctggagacgtggaggagaaccctggacct

SEQ ID NO: 874 - protein, 22 aa, Artificial Sequence
  Description of Artificial Sequence: Synthetic peptide
GSGATNFSLLKQAGDVEENPGP

SEQ ID NO: 875 - DNA, 66 bp, Artificial Sequence
  Description of Artificial Sequence: Synthetic oligonucleotide
ggttccggagctaccaacttctcgctgttgaagcaggccggagatgtcgaggaaaacccgggacct

SEQ ID NO: 876 - DNA, 15 bp, Artificial Sequence
  Description of Artificial Sequence: Synthetic oligonucleotide
ggtggaggtggcagc

SEQ ID NO: 877 - protein, 5 aa, Artificial Sequence
  Description of Artificial Sequence: Synthetic peptide
GGGGS

SEQ ID NO: 878-895 - skipped (18 entries)

SEQ ID NO: 896 - protein, 5 aa, Artificial Sequence
  Description of Artificial Sequence: Synthetic peptide
NYNLH

SEQ ID NO: 897 - protein, 17 aa, Artificial Sequence
  Description of Artificial Sequence: Synthetic peptide
AIYPGNYDTSYNQKFKG

SEQ ID NO: 898 - protein, 13 aa, Artificial Sequence
  Description of Artificial Sequence: Synthetic peptide
VDFGHSRYWYFDV

SEQ ID NO: 899 - protein, 7 aa, Artificial Sequence
  Description of Artificial Sequence: Synthetic peptide
GYTFTNY

SEQ ID NO: 900 - protein, 6 aa, Artificial Sequence
  Description of Artificial Sequence: Synthetic peptide
YPGNYD

SEQ ID NO: 901 - protein, 13 aa, Artificial Sequence
  Description of Artificial Sequence: Synthetic peptide
VDFGHSRYWYFDV

SEQ ID NO: 902 - skipped

SEQ ID NO: 903 - protein, 8 aa, Artificial Sequence
  Description of Artificial Sequence: Synthetic peptide
GYTFTNYN

SEQ ID NO: 904 - protein, 8 aa, Artificial Sequence
  Description of Artificial Sequence: Synthetic peptide
IYPGNYDT

SEQ ID NO: 905 - protein, 15 aa, Artificial Sequence
  Description of Artificial Sequence: Synthetic peptide
ARVDFGHSRYWYFDV

SEQ ID NO: 906 - protein, 10 aa, Artificial Sequence
  Description of Artificial Sequence: Synthetic peptide
GYTFTNYNLH

SEQ ID NO: 907 - protein, 17 aa, Artificial Sequence
  Description of Artificial Sequence: Synthetic peptide
AIYPGNYDTSYNQKFKG

SEQ ID NO: 908 - protein, 13 aa, Artificial Sequence
  Description of Artificial Sequence: Synthetic peptide
VDFGHSRYWYFDV

SEQ ID NO: 909 - protein, 122 aa, Artificial Sequence; identical to SEQ ID NO: 778
  Description of Artificial Sequence: Synthetic polypeptide

SEQ ID NO: 910 - protein, 10 aa, Artificial Sequence
  Description of Artificial Sequence: Synthetic peptide
RATSSVSSMN

SEQ ID NO: 911 - protein, 7 aa, Artificial Sequence
  Description of Artificial Sequence: Synthetic peptide
ATSNLAS

SEQ ID NO: 912 - protein, 9 aa, Artificial Sequence
  Description of Artificial Sequence: Synthetic peptide
QQWTFNPPT

SEQ ID NO: 913 - protein, 6 aa, Artificial Sequence
  Description of Artificial Sequence: Synthetic peptide
TSSVSS

SEQ ID NO: 914 - protein, 3 aa, Artificial Sequence
  Description of Artificial Sequence: Synthetic peptide
ATS

SEQ ID NO: 915 - protein, 6 aa, Artificial Sequence
  Description of Artificial Sequence: Synthetic peptide
WTFNPP

SEQ ID NO: 916 - protein, 5 aa, Artificial Sequence
  Description of Artificial Sequence: Synthetic peptide
SSVSS

SEQ ID NO: 917 - protein, 3 aa, Artificial Sequence
  Description of Artificial Sequence: Synthetic peptide
ATS

SEQ ID NO: 918 - protein, 9 aa, Artificial Sequence
  Description of Artificial Sequence: Synthetic peptide
QQWTFNPPT

SEQ ID NO: 919 - protein, 10 aa, Artificial Sequence
  Description of Artificial Sequence: Synthetic peptide
RATSSVSSMN

SEQ ID NO: 920 - protein, 7 aa, Artificial Sequence
  Description of Artificial Sequence: Synthetic peptide
ATSNLAS

SEQ ID NO: 921 - protein, 9 aa, Artificial Sequence
  Description of Artificial Sequence: Synthetic peptide
QQWTFNPPT

SEQ ID NO: 922 - protein, 106 aa, Artificial Sequence
  Description of Artificial Sequence: Synthetic polypeptide
EIVLTQSPATLSLSPGERATLSCRATSSVSSMNWYQQKPGQAPRPLIHATSNLASGIPARFSGSGSGTDYTLTISSLEPEDAAVYYCQQWTFNPPTFGQGTKLEIK

SEQ ID NO: 923 - protein, 248 aa, Artificial Sequence
  Description of Artificial Sequence: Synthetic polypeptide
QVQLVQSGAEVKKPGASVKVSCKASGYTFTNYNLHWVRQAPGQGLEWMGAIYPGNYDTSYNQKFKGRVTMTADKSTSTAYMELSSLRSEDTAVYYCARVDFGHSRYWYFDVWGQGTTVTVSSGGGGSGGGGSGGGGSGGGGSEIVLTQSPATLSLSPGERATLSCRATSSVSSMNWYQQKPGQAPRPLIHATSNLASGIPARFSGSGSGTDYTLTISSLEPEDAAVYYCQQWTFNPPTFGQGTKLEIK

SEQ ID NO: 924 - protein, 492 aa, Artificial Sequence
  Description of Artificial Sequence: Synthetic polypeptide
MALPVTALLLPLALLLHAARPQVQLVQSGAEVKKPGASVKVSCKASGYTFTNYNLHWVRQAPGQGLEWMGAIYPGNYDTSYNQKFKGRVTMTADKSTSTAYMELSSLRSEDTAVYYCARVDFGHSRYWYFDVWGQGTTVTVSSGGGGSGGGGSGGGGSGGGGSEIVLTQSPATLSLSPGERATLSCRATSSVSSMNWYQQKPGQAPRPLIHATSNLASGIPARFSGSGSGTDYTLTISSLEPEDAAVYYCQQWTFNPPTFGQGTKLEIKTTTPAPRPPTPAPTIASQPLSLRPEACRPAAGGAVHTRGLDFACDIYIWAPLAGTCGVLLLSLVITLYCKRGRKKLLYIFKQPFMRPVQTTQEEDGCSCRFPEEEEGGCELRVKFSRSADAPAYQQGQNQLYNELNLGRREEYDVLDKRRGRDPEMGGKPRRKNPQEGLYNELQKDKMAEAYSEIGMKGERRRGKGHDGLYQGLSTATKDTYDALHMQALPPR

SEQ ID NO: 925 - protein, 5 aa, Artificial Sequence
  Description of Artificial Sequence: Synthetic peptide
NYNLH

SEQ ID NO: 926 - protein, 17 aa, Artificial Sequence
  Description of Artificial Sequence: Synthetic peptide
AIYPGNYDTSYNQKFKG

SEQ ID NO: 927 - protein, 13 aa, Artificial Sequence
  Description of Artificial Sequence: Synthetic peptide
VDFGHSRYWYFDV

SEQ ID NO: 928 - protein, 7 aa, Artificial Sequence
  Description of Artificial Sequence: Synthetic peptide
GYTFTNY

SEQ ID NO: 929 - protein, 6 aa, Artificial Sequence
  Description of Artificial Sequence: Synthetic peptide
YPGNYD

SEQ ID NO: 930 - protein, 13 aa, Artificial Sequence
  Description of Artificial Sequence: Synthetic peptide
VDFGHSRYWYFDV

SEQ ID NO: 931 - protein, 8 aa, Artificial Sequence
  Description of Artificial Sequence: Synthetic peptide
GYTFTNYN

SEQ ID NO: 932 - protein, 8 aa, Artificial Sequence
  Description of Artificial Sequence: Synthetic peptide
IYPGNYDT

SEQ ID NO: 933 - protein, 15 aa, Artificial Sequence
  Description of Artificial Sequence: Synthetic peptide
ARVDFGHSRYWYFDV

SEQ ID NO: 934 - protein, 122 aa, Artificial Sequence
  Description of Artificial Sequence: Synthetic polypeptide
QVQLVQSGAEVKKPGSSVKVSCKASGYTFTNYNLHWVRQAPGQGLEWMGAIYPGNYDTSYNQKFKGRVTITADKSTSTAYMELSSLRSEDTAVYYCARVDFGHSRYWYFDVWGQGTTVTVSS

SEQ ID NO: 935 - protein, 10 aa, Artificial Sequence
  Description of Artificial Sequence: Synthetic peptide
RATSSVSSMN

SEQ ID NO: 936 - protein, 7 aa, Artificial Sequence
  Description of Artificial Sequence: Synthetic peptide
ATSNLAS

SEQ ID NO: 937 - protein, 9 aa, Artificial Sequence
  Description of Artificial Sequence: Synthetic peptide
QQWTFNPPT

SEQ ID NO: 938 - protein, 6 aa, Artificial Sequence
  Description of Artificial Sequence: Synthetic peptide
TSSVSS

SEQ ID NO: 939 - protein, 3 aa, Artificial Sequence
  Description of Artificial Sequence: Synthetic peptide
ATS

SEQ ID NO: 940 - protein, 6 aa, Artificial Sequence
  Description of Artificial Sequence: Synthetic peptide
WTFNPP

SEQ ID NO: 941 - protein, 5 aa, Artificial Sequence
  Description of Artificial Sequence: Synthetic peptide
SSVSS

SEQ ID NO: 942 - protein, 3 aa, Artificial Sequence
  Description of Artificial Sequence: Synthetic peptide
ATS

SEQ ID NO: 943 - protein, 9 aa, Artificial Sequence
  Description of Artificial Sequence: Synthetic peptide
QQWTFNPPT

SEQ ID NO: 944 - protein, 10 aa, Artificial Sequence
  Description of Artificial Sequence: Synthetic peptide
RATSSVSSMN

SEQ ID NO: 945 - protein, 7 aa, Artificial Sequence
  Description of Artificial Sequence: Synthetic peptide
ATSNLAS

SEQ ID NO: 946 - protein, 9 aa, Artificial Sequence
  Description of Artificial Sequence: Synthetic peptide
QQWTFNPPT

SEQ ID NO: 947 - protein, 106 aa, Artificial Sequence; identical to SEQ ID NO: 922
  Description of Artificial Sequence: Synthetic polypeptide

SEQ ID NO: 948 - protein, 248 aa, Artificial Sequence
  Description of Artificial Sequence: Synthetic polypeptide
QVQLVQSGAEVKKPGSSVKVSCKASGYTFTNYNLHWVRQAPGQGLEWMGAIYPGNYDTSYNQKFKGRVTITADKSTSTAYMELSSLRSEDTAVYYCARVDFGHSRYWYFDVWGQGTTVTVSSGGGGSGGGGSGGGGSGGGGSEIVLTQSPATLSLSPGERATLSCRATSSVSSMNWYQQKPGQAPRPLIHATSNLASGIPARFSGSGSGTDYTLTISSLEPEDAAVYYCQQWTFNPPTFGQGTKLEIK

SEQ ID NO: 949 - protein, 492 aa, Artificial Sequence
  Description of Artificial Sequence: Synthetic polypeptide
MALPVTALLLPLALLLHAARPQVQLVQSGAEVKKPGSSVKVSCKASGYTFTNYNLHWVRQAPGQGLEWMGAIYPGNYDTSYNQKFKGRVTITADKSTSTAYMELSSLRSEDTAVYYCARVDFGHSRYWYFDVWGQGTTVTVSSGGGGSGGGGSGGGGSGGGGSEIVLTQSPATLSLSPGERATLSCRATSSVSSMNWYQQKPGQAPRPLIHATSNLASGIPARFSGSGSGTDYTLTISSLEPEDAAVYYCQQWTFNPPTFGQGTKLEIKTTTPAPRPPTPAPTIASQPLSLRPEACRPAAGGAVHTRGLDFACDIYIWAPLAGTCGVLLLSLVITLYCKRGRKKLLYIFKQPFMRPVQTTQEEDGCSCRFPEEEEGGCELRVKFSRSADAPAYQQGQNQLYNELNLGRREEYDVLDKRRGRDPEMGGKPRRKNPQEGLYNELQKDKMAEAYSEIGMKGERRRGKGHDGLYQGLSTATKDTYDALHMQALPPR

SEQ ID NO: 950 - protein, 5 aa, Artificial Sequence
  Description of Artificial Sequence: Synthetic peptide
NYNLH

SEQ ID NO: 951 - protein, 17 aa, Artificial Sequence
  Description of Artificial Sequence: Synthetic peptide
AIYPGNYDTSYNQKFKG

SEQ ID NO: 952 - protein, 13 aa, Artificial Sequence
  Description of Artificial Sequence: Synthetic peptide
VDFGHSRYWYFDV

SEQ ID NO: 953 - protein, 7 aa, Artificial Sequence
  Description of Artificial Sequence: Synthetic peptide
GYTFTNY

SEQ ID NO: 954 - protein, 6 aa, Artificial Sequence
  Description of Artificial Sequence: Synthetic peptide
YPGNYD

SEQ ID NO: 955 - protein, 13 aa, Artificial Sequence
  Description of Artificial Sequence: Synthetic peptide
VDFGHSRYWYFDV

SEQ ID NO: 956 - protein, 8 aa, Artificial Sequence
  Description of Artificial Sequence: Synthetic peptide
GYTFTNYN

SEQ ID NO: 957 - protein, 8 aa, Artificial Sequence
  Description of Artificial Sequence: Synthetic peptide
IYPGNYDT

SEQ ID NO: 958 - protein, 15 aa, Artificial Sequence
  Description of Artificial Sequence: Synthetic peptide
ARVDFGHSRYWYFDV

SEQ ID NO: 959 - protein, 10 aa, Artificial Sequence
  Description of Artificial Sequence: Synthetic peptide
GYTFTNYNLH

SEQ ID NO: 960 - protein, 17 aa, Artificial Sequence
  Description of Artificial Sequence: Synthetic peptide
AIYPGNYDTSYNQKFKG

SEQ ID NO: 961 - protein, 13 aa, Artificial Sequence
  Description of Artificial Sequence: Synthetic peptide
VDFGHSRYWYFDV

SEQ ID NO: 962 - protein, 122 aa, Artificial Sequence; identical to SEQ ID NO: 934
  Description of Artificial Sequence: Synthetic polypeptide

SEQ ID NO: 963 - protein, 10 aa, Artificial Sequence
  Description of Artificial Sequence: Synthetic peptide
RATSSVSSMN

SEQ ID NO: 964 - protein, 7 aa, Artificial Sequence
  Description of Artificial Sequence: Synthetic peptide
ATSNLAS

SEQ ID NO: 965 - protein, 9 aa, Artificial Sequence
  Description of Artificial Sequence: Synthetic peptide
QQWTFNPPT

SEQ ID NO: 966 - protein, 6 aa, Artificial Sequence
  Description of Artificial Sequence: Synthetic peptide
TSSVSS

SEQ ID NO: 967 - protein, 3 aa, Artificial Sequence
  Description of Artificial Sequence: Synthetic peptide
ATS

SEQ ID NO: 968 - protein, 6 aa, Artificial Sequence
  Description of Artificial Sequence: Synthetic peptide
WTFNPP

SEQ ID NO: 969 - protein, 5 aa, Artificial Sequence
  Description of Artificial Sequence: Synthetic peptide
SSVSS

SEQ ID NO: 970 - protein, 3 aa, Artificial Sequence
  Description of Artificial Sequence: Synthetic peptide
ATS

SEQ ID NO: 971 - protein, 9 aa, Artificial Sequence
  Description of Artificial Sequence: Synthetic peptide
QQWTFNPPT

SEQ ID NO: 972 - protein, 10 aa, Artificial Sequence
  Description of Artificial Sequence: Synthetic peptide
RATSSVSSMN

SEQ ID NO: 973 - protein, 7 aa, Artificial Sequence
  Description of Artificial Sequence: Synthetic peptide
ATSNLAS

SEQ ID NO: 974 - protein, 9 aa, Artificial Sequence
  Description of Artificial Sequence: Synthetic peptide
QQWTFNPPT

SEQ ID NO: 975 - protein, 106 aa, Artificial Sequence; identical to SEQ ID NO: 787
  Description of Artificial Sequence: Synthetic polypeptide

SEQ ID NO: 976 - protein, 248 aa, Artificial Sequence
  Description of Artificial Sequence: Synthetic polypeptide
QVQLVQSGAEVKKPGSSVKVSCKASGYTFTNYNLHWVRQAPGQGLEWMGAIYPGNYDTSYNQKFKGRVTITADKSTSTAYMELSSLRSEDTAVYYCARVDFGHSRYWYFDVWGQGTTVTVSSGGGGSGGGGSGGGGSGGGGSDIQLTQSPSFLSASVGDRVTITCRATSSVSSMNWYQQKPGKAPKPLIHATSNLASGVPSRFSGSGSGTEYTLTISSLQPEDFATYYCQQWTFNPPTFGQGTKLEIK

SEQ ID NO: 977 - protein, 492 aa, Artificial Sequence
  Description of Artificial Sequence: Synthetic polypeptide
MALPVTALLLPLALLLHAARPQVQLVQSGAEVKKPGSSVKVSCKASGYTFTNYNLHWVRQAPGQGLEWMGAIYPGNYDTSYNQKFKGRVTITADKSTSTAYMELSSLRSEDTAVYYCARVDFGHSRYWYFDVWGQGTTVTVSSGGGGSGGGGSGGGGSGGGGSDIQLTQSPSFLSASVGDRVTITCRATSSVSSMNWYQQKPGKAPKPLIHATSNLASGVPSRFSGSGSGTEYTLTISSLQPEDFATYYCQQWTFNPPTFGQGTKLEIKTTTPAPRPPTPAPTIASQPLSLRPEACRPAAGGAVHTRGLDFACDIYIWAPLAGTCGVLLLSLVITLYCKRGRKKLLYIFKQPFMRPVQTTQEEDGCSCRFPEEEEGGCELRVKFSRSADAPAYQQGQNQLYNELNLGRREEYDVLDKRRGRDPEMGGKPRRKNPQEGLYNELQKDKMAEAYSEIGMKGERRRGKGHDGLYQGLSTATKDTYDALHMQALPPR

SEQ ID NO: 978 - protein, 5 aa, Artificial Sequence
  Description of Artificial Sequence: Synthetic peptide
NYWMH

SEQ ID NO: 979 - protein, 17 aa, Artificial Sequence
  Description of Artificial Sequence: Synthetic peptide
FITPTTGYPEYNQKFKD

SEQ ID NO: 980 - protein, 13 aa, Artificial Sequence
  Description of Artificial Sequence: Synthetic peptide
RKVGKGVYYALDY

SEQ ID NO: 981 - protein, 7 aa, Artificial Sequence
  Description of Artificial Sequence: Synthetic peptide
GYTFTNY

SEQ ID NO: 982 - protein, 6 aa, Artificial Sequence
  Description of Artificial Sequence: Synthetic peptide
TPTTGY

SEQ ID NO: 983 - protein, 13 aa, Artificial Sequence
  Description of Artificial Sequence: Synthetic peptide
RKVGKGVYYALDY

SEQ ID NO: 984 - protein, 8 aa, Artificial Sequence
  Description of Artificial Sequence: Synthetic peptide
GYTFTNYW

SEQ ID NO: 985 - protein, 8 aa, Artificial Sequence
  Description of Artificial Sequence: Synthetic peptide
ITPTTGYP

SEQ ID NO: 986 - protein, 15 aa, Artificial Sequence
  Description of Artificial Sequence: Synthetic peptide
ARRKVGKGVYYALDY

SEQ ID NO: 987 - protein, 10 aa, Artificial Sequence
  Description of Artificial Sequence: Synthetic peptide
GYTFTNYWMH

SEQ ID NO: 988 - protein, 17 aa, Artificial Sequence
  Description of Artificial Sequence: Synthetic peptide
FITPTTGYPEYNQKFKD

SEQ ID NO: 989 - protein, 13 aa, Artificial Sequence
  Description of Artificial Sequence: Synthetic peptide
RKVGKGVYYALDY

SEQ ID NO: 990 - protein, 122 aa, Artificial Sequence
  Description of Artificial Sequence: Synthetic polypeptide
QVQLVQSGAEVKKPGASVKVSCKASGYTFTNYWMHWVRQAPGQGLEWMGFITPTTGYPEYNQKFKDRVTMTADKSTSTAYMELSSLRSEDTAVYYCARRKVGKGVYYALDYWGQGTTVTVSS

SEQ ID NO: 991 - protein, 11 aa, Artificial Sequence
  Description of Artificial Sequence: Synthetic peptide
RASGNIHNYLA

SEQ ID NO: 992 - protein, 7 aa, Artificial Sequence
  Description of Artificial Sequence: Synthetic peptide
NTKTLAD

SEQ ID NO: 993 - protein, 9 aa, Artificial Sequence
  Description of Artificial Sequence: Synthetic peptide
QHFWSSPWT

SEQ ID NO: 994 - protein, 7 aa, Artificial Sequence
  Description of Artificial Sequence: Synthetic peptide
SGNIHNY

SEQ ID NO: 995 - protein, 3 aa, Artificial Sequence
  Description of Artificial Sequence: Synthetic peptide
NTK

SEQ ID NO: 996 - protein, 6 aa, Artificial Sequence
  Description of Artificial Sequence: Synthetic peptide
FWSSPW

SEQ ID NO: 997 - protein, 6 aa, Artificial Sequence
  Description of Artificial Sequence: Synthetic peptide
GNIHNY

SEQ ID NO: 998 - protein, 3 aa, Artificial Sequence
  Description of Artificial Sequence: Synthetic peptide
NTK

SEQ ID NO: 999 - protein, 9 aa, Artificial Sequence
  Description of Artificial Sequence: Synthetic peptide
QHFWSSPWT

SEQ ID NO: 1000 - protein, 11 aa, Artificial Sequence
  Description of Artificial Sequence: Synthetic peptide
RASGNIHNYLA

SEQ ID NO: 1001 - protein, 7 aa, Artificial Sequence
  Description of Artificial Sequence: Synthetic peptide
NTKTLAD

SEQ ID NO: 1002 - protein, 9 aa, Artificial Sequence
  Description of Artificial Sequence: Synthetic peptide
QHFWSSPWT

SEQ ID NO: 1003 - protein, 107 aa, Artificial Sequence
  Description of Artificial Sequence: Synthetic polypeptide
DIQMTQSPSSLSASVGDRVTITCRASGNIHNYLAWYQQKPGKVPKLLIYNTKTLADGVPSRFSGSGSGTDYTLTISSLQPEDVATYYCQHFWSSPWTFGGGTKVEIK

SEQ ID NO: 1004 - protein, 249 aa, Artificial Sequence
  Description of Artificial Sequence: Synthetic polypeptide
QVQLVQSGAEVKKPGASVKVSCKASGYTFTNYWMHWVRQAPGQGLEWMGFITPTTGYPEYNQKFKDRVTMTADKSTSTAYMELSSLRSEDTAVYYCARRKVGKGVYYALDYWGQGTTVTVSSGGGGSGGGGSGGGGSGGGGSDIQMTQSPSSLSASVGDRVTITCRASGNIHNYLAWYQQKPGKVPKLLIYNTKTLADGVPSRFSGSGSGTDYTLTISSLQPEDVATYYCQHFWSSPWTFGGGTKVEIK

SEQ ID NO: 1005 - protein, 493 aa, Artificial Sequence
  Description of Artificial Sequence: Synthetic polypeptide
MALPVTALLLPLALLLHAARPQVQLVQSGAEVKKPGASVKVSCKASGYTFTNYWMHWVRQAPGQGLEWMGFITPTTGYPEYNQKFKDRVTMTADKSTSTAYMELSSLRSEDTAVYYCARRKVGKGVYYALDYWGQGTTVTVSSGGGGSGGGGSGGGGSGGGGSDIQMTQSPSSLSASVGDRVTITCRASGNIHNYLAWYQQKPGKVPKLLIYNTKTLADGVPSRFSGSGSGTDYTLTISSLQPEDVATYYCQHFWSSPWTFGGGTKVEIKTTTPAPRPPTPAPTIASQPLSLRPEACRPAAGGAVHTRGLDFACDIYIWAPLAGTCGVLLLSLVITLYCKRGRKKLLYIFKQPFMRPVQTTQEEDGCSCRFPEEEEGGCELRVKFSRSADAPAYQQGQNQLYNELNLGRREEYDVLDKRRGRDPEMGGKPRRKNPQEGLYNELQKDKMAEAYSEIGMKGERRRGKGHDGLYQGLSTATKDTYDALHMQALPPR

SEQ ID NO: 1006 - protein, 5 aa, Artificial Sequence
  Description of Artificial Sequence: Synthetic peptide
NYWMH

SEQ ID NO: 1007 - protein, 17 aa, Artificial Sequence
  Description of Artificial Sequence: Synthetic peptide
FITPTTGYPEYNQKFKD

SEQ ID NO: 1008 - protein, 13 aa, Artificial Sequence
  Description of Artificial Sequence: Synthetic peptide
RKVGKGVYYALDY

SEQ ID NO: 1009 - protein, 7 aa, Artificial Sequence
  Description of Artificial Sequence: Synthetic peptide
GYTFTNY

SEQ ID NO: 1010 - protein, 6 aa, Artificial Sequence
  Description of Artificial Sequence: Synthetic peptide
TPTTGY

SEQ ID NO: 1011 - protein, 13 aa, Artificial Sequence
  Description of Artificial Sequence: Synthetic peptide
RKVGKGVYYALDY

SEQ ID NO: 1012 - protein, 8 aa, Artificial Sequence
  Description of Artificial Sequence: Synthetic peptide
GYTFTNYW

SEQ ID NO: 1013 - protein, 8 aa, Artificial Sequence
  Description of Artificial Sequence: Synthetic peptide
ITPTTGYP

SEQ ID NO: 1014 - protein, 15 aa, Artificial Sequence
  Description of Artificial Sequence: Synthetic peptide
ARRKVGKGVYYALDY

SEQ ID NO: 1015 - protein, 10 aa, Artificial Sequence
  Description of Artificial Sequence: Synthetic peptide
GYTFTNYWMH

SEQ ID NO: 1016 - protein, 17 aa, Artificial Sequence
  Description of Artificial Sequence: Synthetic peptide
FITPTTGYPEYNQKFKD

SEQ ID NO: 1017 - protein, 13 aa, Artificial Sequence
  Description of Artificial Sequence: Synthetic peptide
RKVGKGVYYALDY

SEQ ID NO: 1018 - protein, 122 aa, Artificial Sequence
  Description of Artificial Sequence: Synthetic polypeptide
QVQLVQSGAEVKKPGSSVKVSCKASGYTFTNYWMHWVRQAPGQGLEWMGFITPTTGYPEYNQKFKDRVTITADKSTSTAYMELSSLRSEDTAVYYCARRKVGKGVYYALDYWGQGTTVTVSS

SEQ ID NO: 1019 - protein, 11 aa, Artificial Sequence
  Description of Artificial Sequence: Synthetic peptide
RASGNIHNYLA

SEQ ID NO: 1020 - protein, 7 aa, Artificial Sequence
  Description of Artificial Sequence: Synthetic peptide
NTKTLAD

SEQ ID NO: 1021 - protein, 9 aa, Artificial Sequence
  Description of Artificial Sequence: Synthetic peptide
QHFWSSPWT

SEQ ID NO: 1022 - protein, 7 aa, Artificial Sequence
  Description of Artificial Sequence: Synthetic peptide
SGNIHNY

SEQ ID NO: 1023 - protein, 3 aa, Artificial Sequence
  Description of Artificial Sequence: Synthetic peptide
NTK

SEQ ID NO: 1024 - protein, 6 aa, Artificial Sequence
  Description of Artificial Sequence: Synthetic peptide
FWSSPW

SEQ ID NO: 1025 - protein, 6 aa, Artificial Sequence
  Description of Artificial Sequence: Synthetic peptide
GNIHNY

SEQ ID NO: 1026 - protein, 3 aa, Artificial Sequence
  Description of Artificial Sequence: Synthetic peptide
NTK

SEQ ID NO: 1027 - protein, 9 aa, Artificial Sequence
  Description of Artificial Sequence: Synthetic peptide
QHFWSSPWT

SEQ ID NO: 1028 - protein, 11 aa, Artificial Sequence
  Description of Artificial Sequence: Synthetic peptide
RASGNIHNYLA

SEQ ID NO: 1029 - protein, 7 aa, Artificial Sequence
  Description of Artificial Sequence: Synthetic peptide
NTKTLAD

SEQ ID NO: 1030 - protein, 9 aa, Artificial Sequence
  Description of Artificial Sequence: Synthetic peptide
QHFWSSPWT

SEQ ID NO: 1031 - protein, 107 aa, Artificial Sequence; identical to SEQ ID NO: 1003
  Description of Artificial Sequence: Synthetic polypeptide

SEQ ID NO: 1032 - protein, 249 aa, Artificial Sequence
  Description of Artificial Sequence: Synthetic polypeptide
QVQLVQSGAEVKKPGSSVKVSCKASGYTFTNYWMHWVRQAPGQGLEWMGFITPTTGYPEYNQKFKDRVTITADKSTSTAYMELSSLRSEDTAVYYCARRKVGKGVYYALDYWGQGTTVTVSSGGGGSGGGGSGGGGSGGGGSDIQMTQSPSSLSASVGDRVTITCRASGNIHNYLAWYQQKPGKVPKLLIYNTKTLADGVPSRFSGSGSGTDYTLTISSLQPEDVATYYCQHFWSSPWTFGGGTKVEIK

SEQ ID NO: 1033 - protein, 493 aa, Artificial Sequence
  Description of Artificial Sequence: Synthetic polypeptide
MALPVTALLLPLALLLHAARPQVQLVQSGAEVKKPGSSVKVSCKASGYTFTNYWMHWVRQAPGQGLEWMGFITPTTGYPEYNQKFKDRVTITADKSTSTAYMELSSLRSEDTAVYYCARRKVGKGVYYALDYWGQGTTVTVSSGGGGSGGGGSGGGGSGGGGSDIQMTQSPSSLSASVGDRVTITCRASGNIHNYLAWYQQKPGKVPKLLIYNTKTLADGVPSRFSGSGSGTDYTLTISSLQPEDVATYYCQHFWSSPWTFGGGTKVEIKTTTPAPRPPTPAPTIASQPLSLRPEACRPAAGGAVHTRGLDFACDIYIWAPLAGTCGVLLLSLVITLYCKRGRKKLLYIFKQPFMRPVQTTQEEDGCSCRFPEEEEGGCELRVKFSRSADAPAYQQGQNQLYNELNLGRREEYDVLDKRRGRDPEMGGKPRRKNPQEGLYNELQKDKMAEAYSEIGMKGERRRGKGHDGLYQGLSTATKDTYDALHMQALPPR

SEQ ID NO: 1034 - protein, 5 aa, Artificial Sequence
  Description of Artificial Sequence: Synthetic peptide
NYWMH

SEQ ID NO: 1035 - protein, 17 aa, Artificial Sequence
  Description of Artificial Sequence: Synthetic peptide
FITPTTGYPEYNQKFKD

SEQ ID NO: 1036 - protein, 13 aa, Artificial Sequence
  Description of Artificial Sequence: Synthetic peptide
RKVGKGVYYALDY

SEQ ID NO: 1037 - protein, 7 aa, Artificial Sequence
  Description of Artificial Sequence: Synthetic peptide
GYTFTNY

SEQ ID NO: 1038 - protein, 6 aa, Artificial Sequence
  Description of Artificial Sequence: Synthetic peptide
TPTTGY

SEQ ID NO: 1039 - protein, 13 aa, Artificial Sequence
  Description of Artificial Sequence: Synthetic peptide
RKVGKGVYYALDY

SEQ ID NO: 1040 - protein, 8 aa, Artificial Sequence
  Description of Artificial Sequence: Synthetic peptide
GYTFTNYW

SEQ ID NO: 1041 - protein, 8 aa, Artificial Sequence
  Description of Artificial Sequence: Synthetic peptide
ITPTTGYP

SEQ ID NO: 1042 - protein, 15 aa, Artificial Sequence
  Description of Artificial Sequence: Synthetic peptide
ARRKVGKGVYYALDY

SEQ ID NO: 1043 - protein, 10 aa, Artificial Sequence
  Description of Artificial Sequence: Synthetic peptide
GYTFTNYWMH

SEQ ID NO: 1044 - protein, 17 aa, Artificial Sequence
  Description of Artificial Sequence: Synthetic peptide
FITPTTGYPEYNQKFKD

SEQ ID NO: 1045 - protein, 13 aa, Artificial Sequence
  Description of Artificial Sequence: Synthetic peptide
RKVGKGVYYALDY

SEQ ID NO: 1046 - protein, 122 aa, Artificial Sequence; identical to SEQ ID NO: 990
  Description of Artificial Sequence: Synthetic polypeptide

SEQ ID NO: 1047 - protein, 11 aa, Artificial Sequence
  Description of Artificial Sequence: Synthetic peptide
RASGNIHNYLA

SEQ ID NO: 1048 - protein, 7 aa, Artificial Sequence
  Description of Artificial Sequence: Synthetic peptide
NTKTLAD

SEQ ID NO: 1049 - protein, 9 aa, Artificial Sequence
  Description of Artificial Sequence: Synthetic peptide
QHFWSSPWT

SEQ ID NO: 1050 - protein, 7 aa, Artificial Sequence
  Description of Artificial Sequence: Synthetic peptide
SGNIHNY

SEQ ID NO: 1051 - protein, 3 aa, Artificial Sequence
  Description of Artificial Sequence: Synthetic peptide
NTK

SEQ ID NO: 1052 - protein, 6 aa, Artificial Sequence
  Description of Artificial Sequence: Synthetic peptide
FWSSPW

SEQ ID NO: 1053 - protein, 6 aa, Artificial Sequence
  Description of Artificial Sequence: Synthetic peptide
GNIHNY

SEQ ID NO: 1054 - protein, 3 aa, Artificial Sequence
  Description of Artificial Sequence: Synthetic peptide
NTK

SEQ ID NO: 1055 - protein, 9 aa, Artificial Sequence
  Description of Artificial Sequence: Synthetic peptide
QHFWSSPWT

SEQ ID NO: 1056 - protein, 11 aa, Artificial Sequence
  Description of Artificial Sequence: Synthetic peptide
RASGNIHNYLA

SEQ ID NO: 1057 - protein, 7 aa, Artificial Sequence
  Description of Artificial Sequence: Synthetic peptide
NTKTLAD

SEQ ID NO: 1058 - protein, 9 aa, Artificial Sequence
  Description of Artificial Sequence: Synthetic peptide
QHFWSSPWT

SEQ ID NO: 1059 - protein, 107 aa, Artificial Sequence
  Description of Artificial Sequence: Synthetic polypeptide
AIRMTQSPFSLSASVGDRVTITCRASGNIHNYLAWYQQKPAKAPKLFIYNTKTLADGVPSRFSGSGSGTDYTLTISSLQPEDFATYYCQHFWSSPWTFGGGTKVEIK

SEQ ID NO: 1060 - protein, 249 aa, Artificial Sequence
  Description of Artificial Sequence: Synthetic polypeptide
QVQLVQSGAEVKKPGASVKVSCKASGYTFTNYWMHWVRQAPGQGLEWMGFITPTTGYPEYNQKFKDRVTMTADKSTSTAYMELSSLRSEDTAVYYCARRKVGKGVYYALDYWGQGTTVTVSSGGGGSGGGGSGGGGSGGGGSAIRMTQSPFSLSASVGDRVTITCRASGNIHNYLAWYQQKPAKAPKLFIYNTKTLADGVPSRFSGSGSGTDYTLTISSLQPEDFATYYCQHFWSSPWTFGGGTKVEIK

SEQ ID NO: 1061 - protein, 493 aa, Artificial Sequence
  Description of Artificial Sequence: Synthetic polypeptide
MALPVTALLLPLALLLHAARPQVQLVQSGAEVKKPGASVKVSCKASGYTFTNYWMHWVRQAPGQGLEWMGFITPTTGYPEYNQKFKDRVTMTADKSTSTAYMELSSLRSEDTAVYYCARRKVGKGVYYALDYWGQGTTVTVSSGGGGSGGGGSGGGGSGGGGSAIRMTQSPFSLSASVGDRVTITCRASGNIHNYLAWYQQKPAKAPKLFIYNTKTLADGVPSRFSGSGSGTDYTLTISSLQPEDFATYYCQHFWSSPWTFGGGTKVEIKTTTPAPRPPTPAPTIASQPLSLRPEACRPAAGGAVHTRGLDFACDIYIWAPLAGTCGVLLLSLVITLYCKRGRKKLLYIFKQPFMRPVQTTQEEDGCSCRFPEEEEGGCELRVKFSRSADAPAYQQGQNQLYNELNLGRREEYDVLDKRRGRDPEMGGKPRRKNPQEGLYNELQKDKMAEAYSEIGMKGERRRGKGHDGLYQGLSTATKDTYDALHMQALPPR

SEQ ID NO: 1062 - protein, 5 aa, Artificial Sequence
  Description of Artificial Sequence: Synthetic peptide
NYWMH

SEQ ID NO: 1063 - protein, 17 aa, Artificial Sequence
  Description of Artificial Sequence: Synthetic peptide
FITPTTGYPEYNQKFKD

SEQ ID NO: 1064 - protein, 13 aa, Artificial Sequence
  Description of Artificial Sequence: Synthetic peptide
RKVGKGVYYALDY

SEQ ID NO: 1065 - protein, 7 aa, Artificial Sequence
  Description of Artificial Sequence: Synthetic peptide
GYTFTNY

SEQ ID NO: 1066 - protein, 6 aa, Artificial Sequence
  Description of Artificial Sequence: Synthetic peptide
TPTTGY

SEQ ID NO: 1067 - protein, 13 aa, Artificial Sequence
  Description of Artificial Sequence: Synthetic peptide
RKVGKGVYYALDY

SEQ ID NO: 1068 - protein, 8 aa, Artificial Sequence
  Description of Artificial Sequence: Synthetic peptide
GYTFTNYW

SEQ ID NO: 1069 - protein, 8 aa, Artificial Sequence
  Description of Artificial Sequence: Synthetic peptide
ITPTTGYP

SEQ ID NO: 1070 - protein, 15 aa, Artificial Sequence
  Description of Artificial Sequence: Synthetic peptide
ARRKVGKGVYYALDY

SEQ ID NO: 1071 - protein, 10 aa, Artificial Sequence
  Description of Artificial Sequence: Synthetic peptide
GYTFTNYWMH

SEQ ID NO: 1072 - protein, 17 aa, Artificial Sequence
  Description of Artificial Sequence: Synthetic peptide
FITPTTGYPEYNQKFKD

SEQ ID NO: 1073 - protein, 13 aa, Artificial Sequence
  Description of Artificial Sequence: Synthetic peptide
RKVGKGVYYALDY

SEQ ID NO: 1074 - protein, 122 aa, Artificial Sequence; identical to SEQ ID NO: 1018
  Description of Artificial Sequence: Synthetic polypeptide

SEQ ID NO: 1075 - protein, 11 aa, Artificial Sequence
  Description of Artificial Sequence: Synthetic peptide
RASGNIHNYLA

SEQ ID NO: 1076 - protein, 7 aa, Artificial Sequence
  Description of Artificial Sequence: Synthetic peptide
NTKTLAD

SEQ ID NO: 1077 - protein, 9 aa, Artificial Sequence
  Description of Artificial Sequence: Synthetic peptide
QHFWSSPWT

SEQ ID NO: 1078 - protein, 7 aa, Artificial Sequence
  Description of Artificial Sequence: Synthetic peptide
SGNIHNY

SEQ ID NO: 1079 - protein, 3 aa, Artificial Sequence
  Description of Artificial Sequence: Synthetic peptide
NTK

SEQ ID NO: 1080 - protein, 6 aa, Artificial Sequence
  Description of Artificial Sequence: Synthetic peptide
FWSSPW

SEQ ID NO: 1081 - protein, 6 aa, Artificial Sequence
  Description of Artificial Sequence: Synthetic peptide
GNIHNY

SEQ ID NO: 1082 - protein, 3 aa, Artificial Sequence
  Description of Artificial Sequence: Synthetic peptide
NTK

SEQ ID NO: 1083 - protein, 9 aa, Artificial Sequence
  Description of Artificial Sequence: Synthetic peptide
QHFWSSPWT

SEQ ID NO: 1084 - protein, 11 aa, Artificial Sequence
  Description of Artificial Sequence: Synthetic peptide
RASGNIHNYLA

SEQ ID NO: 1085 - protein, 7 aa, Artificial Sequence
  Description of Artificial Sequence: Synthetic peptide
NTKTLAD

SEQ ID NO: 1086 - protein, 9 aa, Artificial Sequence
  Description of Artificial Sequence: Synthetic peptide
QHFWSSPWT

SEQ ID NO: 1087 - protein, 107 aa, Artificial Sequence; identical to SEQ ID NO: 1059
  Description of Artificial Sequence: Synthetic polypeptide

SEQ ID NO: 1088 - protein, 249 aa, Artificial Sequence
  Description of Artificial Sequence: Synthetic polypeptide
QVQLVQSGAEVKKPGSSVKVSCKASGYTFTNYWMHWVRQAPGQGLEWMGFITPTTGYPEYNQKFKDRVTITADKSTSTAYMELSSLRSEDTAVYYCARRKVGKGVYYALDYWGQGTTVTVSSGGGGSGGGGSGGGGSGGGGSAIRMTQSPFSLSASVGDRVTITCRASGNIHNYLAWYQQKPAKAPKLFIYNTKTLADGVPSRFSGSGSGTDYTLTISSLQPEDFATYYCQHFWSSPWTFGGGTKVEIK

SEQ ID NO: 1089 - protein, 493 aa, Artificial Sequence
  Description of Artificial Sequence: Synthetic polypeptide
MALPVTALLLPLALLLHAARPQVQLVQSGAEVKKPGSSVKVSCKASGYTFTNYWMHWVRQAPGQGLEWMGFITPTTGYPEYNQKFKDRVTITADKSTSTAYMELSSLRSEDTAVYYCARRKVGKGVYYALDYWGQGTTVTVSSGGGGSGGGGSGGGGSGGGGSAIRMTQSPFSLSASVGDRVTITCRASGNIHNYLAWYQQKPAKAPKLFIYNTKTLADGVPSRFSGSGSGTDYTLTISSLQPEDFATYYCQHFWSSPWTFGGGTKVEIKTTTPAPRPPTPAPTIASQPLSLRPEACRPAAGGAVHTRGLDFACDIYIWAPLAGTCGVLLLSLVITLYCKRGRKKLLYIFKQPFMRPVQTTQEEDGCSCRFPEEEEGGCELRVKFSRSADAPAYQQGQNQLYNELNLGRREEYDVLDKRRGRDPEMGGKPRRKNPQEGLYNELQKDKMAEAYSEIGMKGERRRGKGHDGLYQGLSTATKDTYDALHMQALPPR

SEQ ID NO: 1090 - protein, 5 aa, Artificial Sequence
  Description of Artificial Sequence: Synthetic peptide
SYNMH

SEQ ID NO: 1091 - protein, 17 aa, Artificial Sequence
  Description of Artificial Sequence: Synthetic peptide
AIYPGNGDTSYNPKFKG

SEQ ID NO: 1092 - protein, 13 aa, Artificial Sequence
  Description of Artificial Sequence: Synthetic peptide
SYFYGSSSWYFDV

SEQ ID NO: 1093 - protein, 7 aa, Artificial Sequence
  Description of Artificial Sequence: Synthetic peptide
GYTFTSY

SEQ ID NO: 1094 - protein, 6 aa, Artificial Sequence
  Description of Artificial Sequence: Synthetic peptide
YPGNGD

SEQ ID NO: 1095 - protein, 13 aa, Artificial Sequence
  Description of Artificial Sequence: Synthetic peptide
SYFYGSSSWYFDV

SEQ ID NO: 1096 - protein, 8 aa, Artificial Sequence
  Description of Artificial Sequence: Synthetic peptide
GYTFTSYN

SEQ ID NO: 1097 - protein, 8 aa, Artificial Sequence
  Description of Artificial Sequence: Synthetic peptide
IYPGNGDT

SEQ ID NO: 1098 - protein, 15 aa, Artificial Sequence
  Description of Artificial Sequence: Synthetic peptide
ARSYFYGSSSWYFDV

SEQ ID NO: 1099 - protein, 10 aa, Artificial Sequence
  Description of Artificial Sequence: Synthetic peptide
GYTFTSYNMH

SEQ ID NO: 1100 - protein, 17 aa, Artificial Sequence
  Description of Artificial Sequence: Synthetic peptide
AIYPGNGDTSYNPKFKG

SEQ ID NO: 1101 - protein, 13 aa, Artificial Sequence
  Description of Artificial Sequence: Synthetic peptide
SYFYGSSSWYFDV

SEQ ID NO: 1102 - protein, 122 aa, Artificial Sequence; identical to SEQ ID NO: 801
  Description of Artificial Sequence: Synthetic polypeptide

SEQ ID NO: 1103 - protein, 10 aa, Artificial Sequence
  Description of Artificial Sequence: Synthetic peptide
RASSSVSSMH

SEQ ID NO: 1104 - protein, 7 aa, Artificial Sequence
  Description of Artificial Sequence: Synthetic peptide
ATSNLAS

SEQ ID NO: 1105 - protein, 9 aa, Artificial Sequence
  Description of Artificial Sequence: Synthetic peptide
QQWIFNPPT

SEQ ID NO: 1106 - protein, 6 aa, Artificial Sequence
  Description of Artificial Sequence: Synthetic peptide
SSSVSS

SEQ ID NO: 1107 - protein, 3 aa, Artificial Sequence
  Description of Artificial Sequence: Synthetic peptide
ATS

SEQ ID NO: 1108 - protein, 6 aa, Artificial Sequence
  Description of Artificial Sequence: Synthetic peptide
WIFNPP

SEQ ID NO: 1109 - protein, 5 aa, Artificial Sequence
  Description of Artificial Sequence: Synthetic peptide
SSVSS

SEQ ID NO: 1110 - protein, 3 aa, Artificial Sequence
  Description of Artificial Sequence: Synthetic peptide
ATS

SEQ ID NO: 1111 - protein, 9 aa, Artificial Sequence
  Description of Artificial Sequence: Synthetic peptide
QQWIFNPPT

SEQ ID NO: 1112 - protein, 10 aa, Artificial Sequence
  Description of Artificial Sequence: Synthetic peptide
RASSSVSSMH

SEQ ID NO: 1113 - protein, 7 aa, Artificial Sequence
  Description of Artificial Sequence: Synthetic peptide
ATSNLAS

SEQ ID NO: 1114 - protein, 9 aa, Artificial Sequence
  Description of Artificial Sequence: Synthetic peptide
QQWIFNPPT

SEQ ID NO: 1115 - protein, 106 aa, Artificial Sequence
  Description of Artificial Sequence: Synthetic polypeptide
DIQLTQSPSFLSASVGDRVTITCRASSSVSSMHWYQQKPGKAPKPLIFATSNLASGVPSRFSGSGSGTEYTLTISSLQPEDFATYYCQQWIFNPPTFGGGTKVEIK

SEQ ID NO: 1116 - protein, 248 aa, Artificial Sequence
  Description of Artificial Sequence: Synthetic polypeptide
QVQLVQSGAEVKKPGASVKVSCKASGYTFTSYNMHWVRQAPGQGLEWMGAIYPGNGDTSYNPKFKGRVTMTADKSTRTAYMELSSLRSEDTAVYYCARSYFYGSSSWYFDVWGQGTTVTVSSGGGGSGGGGSGGGGSGGGGSDIQLTQSPSFLSASVGDRVTITCRASSSVSSMHWYQQKPGKAPKPLIFATSNLASGVPSRFSGSGSGTEYTLTISSLQPEDFATYYCQQWIFNPPTFGGGTKVEIK

SEQ ID NO: 1117 - protein, 492 aa, Artificial Sequence
  Description of Artificial Sequence: Synthetic polypeptide
MALPVTALLLPLALLLHAARPQVQLVQSGAEVKKPGASVKVSCKASGYTFTSYNMHWVRQAPGQGLEWMGAIYPGNGDTSYNPKFKGRVTMTADKSTRTAYMELSSLRSEDTAVYYCARSYFYGSSSWYFDVWGQGTTVTVSSGGGGSGGGGSGGGGSGGGGSDIQLTQSPSFLSASVGDRVTITCRASSSVSSMHWYQQKPGKAPKPLIFATSNLASGVPSRFSGSGSGTEYTLTISSLQPEDFATYYCQQWIFNPPTFGGGTKVEIKTTTPAPRPPTPAPTIASQPLSLRPEACRPAAGGAVHTRGLDFACDIYIWAPLAGTCGVLLLSLVITLYCKRGRKKLLYIFKQPFMRPVQTTQEEDGCSCRFPEEEEGGCELRVKFSRSADAPAYQQGQNQLYNELNLGRREEYDVLDKRRGRDPEMGGKPRRKNPQEGLYNELQKDKMAEAYSEIGMKGERRRGKGHDGLYQGLSTATKDTYDALHMQALPPR

SEQ ID NO: 1118 - protein, 5 aa, Artificial Sequence
  Description of Artificial Sequence: Synthetic peptide
SYNMH

SEQ ID NO: 1119 - protein, 17 aa, Artificial Sequence
  Description of Artificial Sequence: Synthetic peptide
AIYPGNGDTSYNPKFKG

SEQ ID NO: 1120 - protein, 13 aa, Artificial Sequence
  Description of Artificial Sequence: Synthetic peptide
SYFYGSSSWYFDV

SEQ ID NO: 1121 - protein, 7 aa, Artificial Sequence
  Description of Artificial Sequence: Synthetic peptide
GYTFTSY

SEQ ID NO: 1122 - protein, 6 aa, Artificial Sequence
  Description of Artificial Sequence: Synthetic peptide
YPGNGD

SEQ ID NO: 1123 - protein, 13 aa, Artificial Sequence
  Description of Artificial Sequence: Synthetic peptide
SYFYGSSSWYFDV

SEQ ID NO: 1124 - protein, 8 aa, Artificial Sequence
  Description of Artificial Sequence: Synthetic peptide
GYTFTSYN

SEQ ID NO: 1125 - protein, 8 aa, Artificial Sequence
  Description of Artificial Sequence: Synthetic peptide
IYPGNGDT

SEQ ID NO: 1126 - protein, 15 aa, Artificial Sequence
  Description of Artificial Sequence: Synthetic peptide
ARSYFYGSSSWYFDV

SEQ ID NO: 1127 - protein, 10 aa, Artificial Sequence
  Description of Artificial Sequence: Synthetic peptide
GYTFTSYNMH

SEQ ID NO: 1128 - protein, 17 aa, Artificial Sequence
  Description of Artificial Sequence: Synthetic peptide
AIYPGNGDTSYNPKFKG

SEQ ID NO: 1129 - protein, 13 aa, Artificial Sequence
  Description of Artificial Sequence: Synthetic peptide
SYFYGSSSWYFDV

SEQ ID NO: 1130 - protein, 122 aa, Artificial Sequence
  Description of Artificial Sequence: Synthetic polypeptide
QVQLVQSGAEVKKPGSSVKVSCKASGYTFTSYNMHWVRQAPGQGLEWMGAIYPGNGDTSYNPKFKGRVTITADKSTRTAYMELSSLRSEDTAVYYCARSYFYGSSSWYFDVWGQGTTVTVSS

SEQ ID NO: 1131 - protein, 10 aa, Artificial Sequence
  Description of Artificial Sequence: Synthetic peptide
RASSSVSSMH

SEQ ID NO: 1132 - protein, 7 aa, Artificial Sequence
  Description of Artificial Sequence: Synthetic peptide
ATSNLAS

SEQ ID NO: 1133 - protein, 9 aa, Artificial Sequence
  Description of Artificial Sequence: Synthetic peptide
QQWIFNPPT

SEQ ID NO: 1134 - protein, 6 aa, Artificial Sequence
  Description of Artificial Sequence: Synthetic peptide
SSSVSS

SEQ ID NO: 1135 - protein, 3 aa, Artificial Sequence
  Description of Artificial Sequence: Synthetic peptide
ATS

SEQ ID NO: 1136 - protein, 6 aa, Artificial Sequence
  Description of Artificial Sequence: Synthetic peptide
WIFNPP

SEQ ID NO: 1137 - protein, 5 aa, Artificial Sequence
  Description of Artificial Sequence: Synthetic peptide
SSVSS

SEQ ID NO: 1138 - protein, 3 aa, Artificial Sequence
  Description of Artificial Sequence: Synthetic peptide
ATS

SEQ ID NO: 1139 - protein, 9 aa, Artificial Sequence
  Description of Artificial Sequence: Synthetic peptide
QQWIFNPPT

SEQ ID NO: 1140 - protein, 10 aa, Artificial Sequence
  Description of Artificial Sequence: Synthetic peptide
RASSSVSSMH

SEQ ID NO: 1141 - protein, 7 aa, Artificial Sequence
  Description of Artificial Sequence: Synthetic peptide
ATSNLAS

SEQ ID NO: 1142 - protein, 9 aa, Artificial Sequence
  Description of Artificial Sequence: Synthetic peptide
QQWIFNPPT

SEQ ID NO: 1143 - protein, 106 aa, Artificial Sequence; identical to SEQ ID NO: 807
  Description of Artificial Sequence: Synthetic polypeptide

SEQ ID NO: 1144 - protein, 248 aa, Artificial Sequence
  Description of Artificial Sequence: Synthetic polypeptide
QVQLVQSGAEVKKPGSSVKVSCKASGYTFTSYNMHWVRQAPGQGLEWMGAIYPGNGDTSYNPKFKGRVTITADKSTRTAYMELSSLRSEDTAVYYCARSYFYGSSSWYFDVWGQGTTVTVSSGGGGSGGGGSGGGGSGGGGSEIVLTQSPATLSLSPGERATLSCRASSSVSSMHWYQQKPGQAPRPLIFATSNLASGIPARFSGSGSGTDYTLTISSLEPEDAAVYYCQQWIFNPPTFGGGTKVEIK

SEQ ID NO: 1145 - protein, 492 aa, Artificial Sequence
  Description of Artificial Sequence: Synthetic polypeptide
MALPVTALLLPLALLLHAARPQVQLVQSGAEVKKPGSSVKVSCKASGYTFTSYNMHWVRQAPGQGLEWMGAIYPGNGDTSYNPKFKGRVTITADKSTRTAYMELSSLRSEDTAVYYCARSYFYGSSSWYFDVWGQGTTVTVSSGGGGSGGGGSGGGGSGGGGSEIVLTQSPATLSLSPGERATLSCRASSSVSSMHWYQQKPGQAPRPLIFATSNLASGIPARFSGSGSGTDYTLTISSLEPEDAAVYYCQQWIFNPPTFGGGTKVEIKTTTPAPRPPTPAPTIASQPLSLRPEACRPAAGGAVHTRGLDFACDIYIWAPLAGTCGVLLLSLVITLYCKRGRKKLLYIFKQPFMRPVQTTQEEDGCSCRFPEEEEGGCELRVKFSRSADAPAYQQGQNQLYNELNLGRREEYDVLDKRRGRDPEMGGKPRRKNPQEGLYNELQKDKMAEAYSEIGMKGERRRGKGHDGLYQGLSTATKDTYDALHMQALPPR

SEQ ID NO: 1146 - protein, 5 aa, Artificial Sequence
  Description of Artificial Sequence: Synthetic peptide
SYNMH

SEQ ID NO: 1147 - protein, 17 aa, Artificial Sequence
  Description of Artificial Sequence: Synthetic peptide
AIYPGNGDTSYNPKFKG

SEQ ID NO: 1148 - protein, 13 aa, Artificial Sequence
  Description of Artificial Sequence: Synthetic peptide
SYFYGSSSWYFDV

SEQ ID NO: 1149 - protein, 7 aa, Artificial Sequence
  Description of Artificial Sequence: Synthetic peptide
GYTFTSY

SEQ ID NO: 1150 - protein, 6 aa, Artificial Sequence
  Description of Artificial Sequence: Synthetic peptide
YPGNGD

SEQ ID NO: 1151 - protein, 13 aa, Artificial Sequence
  Description of Artificial Sequence: Synthetic peptide
SYFYGSSSWYFDV

SEQ ID NO: 1152 - protein, 8 aa, Artificial Sequence
  Description of Artificial Sequence: Synthetic peptide
GYTFTSYN

SEQ ID NO: 1153 - protein, 8 aa, Artificial Sequence
  Description of Artificial Sequence: Synthetic peptide
IYPGNGDT

SEQ ID NO: 1154 - protein, 15 aa, Artificial Sequence
  Description of Artificial Sequence: Synthetic peptide
ARSYFYGSSSWYFDV

SEQ ID NO: 1155 - protein, 10 aa, Artificial Sequence
  Description of Artificial Sequence: Synthetic peptide
GYTFTSYNMH

SEQ ID NO: 1156 - protein, 17 aa, Artificial Sequence
  Description of Artificial Sequence: Synthetic peptide
AIYPGNGDTSYNPKFKG

SEQ ID NO: 1157 - protein, 13 aa, Artificial Sequence
  Description of Artificial Sequence: Synthetic peptide
SYFYGSSSWYFDV

SEQ ID NO: 1158 - protein, 122 aa, Artificial Sequence; identical to SEQ ID NO: 1130
  Description of Artificial Sequence: Synthetic polypeptide

SEQ ID NO: 1159 - protein, 10 aa, Artificial Sequence
  Description of Artificial Sequence: Synthetic peptide
RASSSVSSMH

SEQ ID NO: 1160 - protein, 7 aa, Artificial Sequence
  Description of Artificial Sequence: Synthetic peptide
ATSNLAS

SEQ ID NO: 1161 - protein, 9 aa, Artificial Sequence
  Description of Artificial Sequence: Synthetic peptide
QQWIFNPPT

SEQ ID NO: 1162 - protein, 6 aa, Artificial Sequence
  Description of Artificial Sequence: Synthetic peptide
SSSVSS

SEQ ID NO: 1163 - protein, 3 aa, Artificial Sequence
  Description of Artificial Sequence: Synthetic peptide
ATS

SEQ ID NO: 1164 - protein, 6 aa, Artificial Sequence
  Description of Artificial Sequence: Synthetic peptide
WIFNPP

SEQ ID NO: 1165 - protein, 5 aa, Artificial Sequence
  Description of Artificial Sequence: Synthetic peptide
SSVSS

SEQ ID NO: 1166 - protein, 3 aa, Artificial Sequence
  Description of Artificial Sequence: Synthetic peptide
ATS

SEQ ID NO: 1167 - protein, 9 aa, Artificial Sequence
  Description of Artificial Sequence: Synthetic peptide
QQWIFNPPT

SEQ ID NO: 1168 - protein, 10 aa, Artificial Sequence
  Description of Artificial Sequence: Synthetic peptide
RASSSVSSMH

SEQ ID NO: 1169 - protein, 7 aa, Artificial Sequence
  Description of Artificial Sequence: Synthetic peptide
ATSNLAS

SEQ ID NO: 1170 - protein, 9 aa, Artificial Sequence
  Description of Artificial Sequence: Synthetic peptide
QQWIFNPPT

SEQ ID NO: 1171 - protein, 106 aa, Artificial Sequence; identical to SEQ ID NO: 1115
  Description of Artificial Sequence: Synthetic polypeptide

SEQ ID NO: 1172 - protein, 248 aa, Artificial Sequence
  Description of Artificial Sequence: Synthetic polypeptide
QVQLVQSGAEVKKPGSSVKVSCKASGYTFTSYNMHWVRQAPGQGLEWMGAIYPGNGDTSYNPKFKGRVTITADKSTRTAYMELSSLRSEDTAVYYCARSYFYGSSSWYFDVWGQGTTVTVSSGGGGSGGGGSGGGGSGGGGSDIQLTQSPSFLSASVGDRVTITCRASSSVSSMHWYQQKPGKAPKPLIFATSNLASGVPSRFSGSGSGTEYTLTISSLQPEDFATYYCQQWIFNPPTFGGGTKVEIK

SEQ ID NO: 1173 - protein, 492 aa, Artificial Sequence
  Description of Artificial Sequence: Synthetic polypeptide
MALPVTALLLPLALLLHAARPQVQLVQSGAEVKKPGSSVKVSCKASGYTFTSYNMHWVRQAPGQGLEWMGAIYPGNGDTSYNPKFKGRVTITADKSTRTAYMELSSLRSEDTAVYYCARSYFYGSSSWYFDVWGQGTTVTVSSGGGGSGGGGSGGGGSGGGGSDIQLTQSPSFLSASVGDRVTITCRASSSVSSMHWYQQKPGKAPKPLIFATSNLASGVPSRFSGSGSGTEYTLTISSLQPEDFATYYCQQWIFNPPTFGGGTKVEIKTTTPAPRPPTPAPTIASQPLSLRPEACRPAAGGAVHTRGLDFACDIYIWAPLAGTCGVLLLSLVITLYCKRGRKKLLYIFKQPFMRPVQTTQEEDGCSCRFPEEEEGGCELRVKFSRSADAPAYQQGQNQLYNELNLGRREEYDVLDKRRGRDPEMGGKPRRKNPQEGLYNELQKDKMAEAYSEIGMKGERRRGKGHDGLYQGLSTATKDTYDALHMQALPPR

SEQ ID NO: 1174 - protein, 122 aa, Artificial Sequence
  Description of Artificial Sequence: Synthetic polypeptide
QVQLQQPGAELVKPGASVKMSCKASGYTFTNYNLHWVKQTPGQGLEWIGAIYPGNYDTSYNQKFKGKATLTADKSSSTAYMLLSSLTSEDSAVYFCARVDFGHSRYWYFDVWGAGTTVTVSS

SEQ ID NO: 1175 - protein, 106 aa, Artificial Sequence
  Description of Artificial Sequence: Synthetic polypeptide
QIVLSQSPAILSASPGEKVTMTCRATSSVSSMNWYQQKPGSFPRPWIHATSNLASGVPARFSGSGSGTSYSLTISRVEAEDAATYYCQQWTFNPPTFGAGAKLELK

SEQ ID NO: 1176 - protein, 122 aa, Artificial Sequence
  Description of Artificial Sequence: Synthetic polypeptide
QVQLQQPGAELVKPGASVKMSCKASGYTFTSYNMHWVKQTPGQGLEWIGAIYPGNGDTSYNPKFKGKATLTADKSSRTAYIHLSSLTSEDSVVYYCARSYFYGSSSWYFDVWGAGTTVTVSS

SEQ ID NO: 1177 - protein, 106 aa, Artificial Sequence
  Description of Artificial Sequence: Synthetic polypeptide
QIILSQSPAILSASPGEKVTLTCRASSSVSSMHWYQQKPGSSPKPWIFATSNLASGVPARFTGSGSGTSYSLTISRVEAEDAATYYCQQWIFNPPTFGGGTSLEIK

SEQ ID NO: 1178 - protein, 122 aa, Artificial Sequence
  Description of Artificial Sequence: Synthetic polypeptide
QVHLQQSGAELAKPGASVKMSCKASGYTFTNYWMHWVKQRPGQGLEWIGFITPTTGYPEYNQKFKDKATLTADKSSSTAYMQLSSLTSEDSAVYYCARRKVGKGVYYALDYWGQGTSVTVSS

SEQ ID NO: 1179 - protein, 107 aa, Artificial Sequence
  Description of Artificial Sequence: Synthetic polypeptide
DILMTQSPASLSASVGETVTITCRASGNIHNYLAWYQQKQGNSPQLLVYNTKTLADGVPSRFSGSGSGTQYSLKINSLQTEDFGTYYCQHFWSSPWTFGGGTKLEIK

SEQ ID NO: 1180 - protein, 9 aa, Artificial Sequence
  Description of Artificial Sequence: Synthetic peptide
GDSMLSNSD

SEQ ID NO: 1181 - protein, 7 aa, Artificial Sequence
  Description of Artificial Sequence: Synthetic peptide
YHRSTWY

SEQ ID NO: 1182 - protein, 15 aa, Artificial Sequence
  Description of Artificial Sequence: Synthetic peptide
VRLQDGNSWSDAFDV

SEQ ID NO: 1183 - protein, 10 aa, Artificial Sequence
  Description of Artificial Sequence: Synthetic peptide
GDSMLSNSDT

SEQ ID NO: 1184 - protein, 9 aa, Artificial Sequence
  Description of Artificial Sequence: Synthetic peptide
TYHRSTWYD

SEQ ID NO: 1185 - protein, 17 aa, Artificial Sequence
  Description of Artificial Sequence: Synthetic peptide
ARVRLQDGNSWSDAFDV

SEQ ID NO: 1186 - protein, 14 aa, Artificial Sequence
  Description of Artificial Sequence: Synthetic peptide
TGTSSDVGGYNYVS

SEQ ID NO: 1187 - protein, 10 aa, Artificial Sequence
  Description of Artificial Sequence: Synthetic peptide
TSSDVGGYNY

SEQ ID NO: 1188 - protein, 9 aa, Artificial Sequence
  Description of Artificial Sequence: Synthetic peptide
SSDVGGYNY

SEQ ID NO: 1189 - protein, 7 aa, Artificial Sequence
  Description of Artificial Sequence: Synthetic peptide
DVSNRPS

SEQ ID NO: 1190 - protein, 3 aa, Artificial Sequence
  Description of Artificial Sequence: Synthetic peptide
DVS

SEQ ID NO: 1191 - protein, 3 aa, Artificial Sequence
  Description of Artificial Sequence: Synthetic peptide
DVS

SEQ ID NO: 1192 - protein, 11 aa, Artificial Sequence
  Description of Artificial Sequence: Synthetic peptide
SSYTSSSTLYV

SEQ ID NO: 1193 - protein, 8 aa, Artificial Sequence
  Description of Artificial Sequence: Synthetic peptide
YTSSSTLY

SEQ ID NO: 1194 - protein, 11 aa, Artificial Sequence
  Description of Artificial Sequence: Synthetic peptide
SSYTSSSTLYV

SEQ ID NO: 1195 - protein, 243 aa, Artificial Sequence; identical to SEQ ID NO: 846
  Description of Artificial Sequence: Synthetic polypeptide

SEQ ID NO: 1196 - protein, 238 aa, Artificial Sequence; identical to SEQ ID NO: 196
  Description of Artificial Sequence: Synthetic polypeptide

SEQ ID NO: 1197 - protein, 127 aa, Artificial Sequence
  Description of Artificial Sequence: Synthetic polypeptide
EVQLQQSGPGLVKPSQTLSLTCAISGDSMLSNSDTWNWIRKSPSRGLEWLGRTYHRSTWYDDYASSVRGRVSINVDTSKNQYSLQLNAVTPEDTGVYYCARVRLQDGNSWSDAFDVWGQGTMVTVSS

SEQ ID NO: 1198 - protein, 111 aa, Artificial Sequence
  Description of Artificial Sequence: Synthetic polypeptide
QSALTQPASASGSPGQSVTISCTGTSSDVGGYNYVSWYQDHPGKAPKLMIYDVSNRPSGVSNRFSGSKSGNTASLTISGLQAEDEADYYCSSYTSSSTLYVFGTGTQLTVL

SEQ ID NO: 1199 - protein, 243 aa, Artificial Sequence
  Description of Artificial Sequence: Synthetic polypeptide
EVQLQQSGPGLVKPSQTLSLTCAISGDSMLSNSDTWNWIRKSPSRGLEWLGRTYHRSTWYDDYASSVRGRVSINVDTSKNQYSLQLNAVTPEDTGVYYCARVRLQDGNSWSDAFDVWGQGTMVTVSSGGGGSQSALTQPASASGSPGQSVTISCTGTSSDVGGYNYVSWYQDHPGKAPKLMIYDVSNRPSGVSNRFSGSKSGNTASLTISGLQAEDEADYYCSSYTSSSTLYVFGTGTQLTVL

SEQ ID NO: 1200 - protein, 7 aa, Artificial Sequence
  Description of Artificial Sequence: Synthetic peptide
SNSDTWN

SEQ ID NO: 1201 - protein, 18 aa, Artificial Sequence
  Description of Artificial Sequence: Synthetic peptide
RTYHRSTWYDDYASSVRG

SEQ ID NO: 1202 - protein, 15 aa, Artificial Sequence
  Description of Artificial Sequence: Synthetic peptide
VRLQDGNSWSDAFDV

SEQ ID NO: 1203 - protein, 9 aa, Artificial Sequence
  Description of Artificial Sequence: Synthetic peptide
GDSVLSNSD

SEQ ID NO: 1204 - protein, 7 aa, Artificial Sequence
  Description of Artificial Sequence: Synthetic peptide
YHRSTWY

SEQ ID NO: 1205 - protein, 15 aa, Artificial Sequence
  Description of Artificial Sequence: Synthetic peptide
VRLQDGNSWSDAFDV

SEQ ID NO: 1206 - protein, 10 aa, Artificial Sequence
  Description of Artificial Sequence: Synthetic peptide
GDSVLSNSDT

SEQ ID NO: 1207 - protein, 9 aa, Artificial Sequence
  Description of Artificial Sequence: Synthetic peptide
TYHRSTWYD

SEQ ID NO: 1208 - protein, 17 aa, Artificial Sequence
  Description of Artificial Sequence: Synthetic peptide
ARVRLQDGNSWSDAFDV

SEQ ID NO: 1209 - protein, 12 aa, Artificial Sequence
  Description of Artificial Sequence: Synthetic peptide
GDSVLSNSDTWN

SEQ ID NO: 1210 - protein, 18 aa, Artificial Sequence
  Description of Artificial Sequence: Synthetic peptide
RTYHRSTWYDDYASSVRG

SEQ ID NO: 1211 - protein, 15 aa, Artificial Sequence
  Description of Artificial Sequence: Synthetic peptide
VRLQDGNSWSDAFDV

SEQ ID NO: 1212 - protein, 127 aa, Artificial Sequence
  Description of Artificial Sequence: Synthetic polypeptide
EVQLQQSGPGLVKPSQTLPLTCAISGDSVLSNSDTWNWIRQSPSRGLEWLGRTYHRSTWYDDYASSVRGRVSINVDTSKNQYSLQLNAVTPEDTGVYYCARVRLQDGNSWSDAFDVWGQGTMVTVSS

SEQ ID NO: 1213 - protein, 14 aa, Artificial Sequence
  Description of Artificial Sequence: Synthetic peptide
TGTSSDVGGYNYVS

SEQ ID NO: 1214 - protein, 7 aa, Artificial Sequence
  Description of Artificial Sequence: Synthetic peptide
DVSNRPS

SEQ ID NO: 1215 - protein, 11 aa, Artificial Sequence
  Description of Artificial Sequence: Synthetic peptide
SSYTSSSTLYV

SEQ ID NO: 1216 - protein, 10 aa, Artificial Sequence
  Description of Artificial Sequence: Synthetic peptide
TSSDVGGYNY

SEQ ID NO: 1217 - protein, 3 aa, Artificial Sequence
  Description of Artificial Sequence: Synthetic peptide
DVS

SEQ ID NO: 1218 - protein, 8 aa, Artificial Sequence
  Description of Artificial Sequence: Synthetic peptide
YTSSSTLY

SEQ ID NO: 1219 - protein, 9 aa, Artificial Sequence
  Description of Artificial Sequence: Synthetic peptide
SSDVGGYNY

SEQ ID NO: 1220 - protein, 3 aa, Artificial Sequence
  Description of Artificial Sequence: Synthetic peptide
DVS

SEQ ID NO: 1221 - protein, 11 aa, Artificial Sequence
  Description of Artificial Sequence: Synthetic peptide
SSYTSSSTLYV

SEQ ID NO: 1222 - protein, 14 aa, Artificial Sequence
  Description of Artificial Sequence: Synthetic peptide
TGTSSDVGGYNYVS

SEQ ID NO: 1223 - protein, 7 aa, Artificial Sequence
  Description of Artificial Sequence: Synthetic peptide
DVSNRPS

SEQ ID NO: 1224 - protein, 11 aa, Artificial Sequence
  Description of Artificial Sequence: Synthetic peptide
SSYTSSSTLYV

SEQ ID NO: 1225 - protein, 111 aa, Artificial Sequence; identical to SEQ ID NO: 755
  Description of Artificial Sequence: Synthetic polypeptide

SEQ ID NO: 1226 - protein, 253 aa, Artificial Sequence
  Description of Artificial Sequence: Synthetic polypeptide
EVQLQQSGPGLVKPSQTLPLTCAISGDSVLSNSDTWNWIRQSPSRGLEWLGRTYHRSTWYDDYASSVRGRVSINVDTSKNQYSLQLNAVTPEDTGVYYCARVRLQDGNSWSDAFDVWGQGTMVTVSSGGGGSGGGGSGGGGPQSALTQPASASGSPGQSVTISCTGTSSDVGGYNYVSWYQQHPGKAPKLMIYDVSNRPSGVSNRFSGSKSGNTASLTISGLQAEDEADYYCSSYTSSSTLYVFGTGTQLTVL

SEQ ID NO: 1227 - protein, 7 aa, Artificial Sequence
  Description of Artificial Sequence: Synthetic peptide
NNNAAWN

SEQ ID NO: 1228 - protein, 18 aa, Artificial Sequence
  Description of Artificial Sequence: Synthetic peptide
RTYHRSTWYNDYVGSVKS

SEQ ID NO: 1229 - protein, 12 aa, Artificial Sequence
  Description of Artificial Sequence: Synthetic peptide
ETDYGDYGAFDI

SEQ ID NO: 1230 - protein, 9 aa, Artificial Sequence
  Description of Artificial Sequence: Synthetic peptide
GDSVSNNNA

SEQ ID NO: 1231 - protein, 7 aa, Artificial Sequence
  Description of Artificial Sequence: Synthetic peptide
YHRSTWY

SEQ ID NO: 1232 - protein, 12 aa, Artificial Sequence
  Description of Artificial Sequence: Synthetic peptide
ETDYGDYGAFDI

SEQ ID NO: 1233 - protein, 10 aa, Artificial Sequence
  Description of Artificial Sequence: Synthetic peptide
GDSVSNNNAA

SEQ ID NO: 1234 - protein, 9 aa, Artificial Sequence
  Description of Artificial Sequence: Synthetic peptide
TYHRSTWYN

SEQ ID NO: 1235 - protein, 14 aa, Artificial Sequence
  Description of Artificial Sequence: Synthetic peptide
ARETDYGDYGAFDI

SEQ ID NO: 1236 - protein, 12 aa, Artificial Sequence
  Description of Artificial Sequence: Synthetic peptide
GDSVSNNNAAWN

SEQ ID NO: 1237 - protein, 18 aa, Artificial Sequence
  Description of Artificial Sequence: Synthetic peptide
RTYHRSTWYNDYVGSVKS

SEQ ID NO: 1238 - protein, 12 aa, Artificial Sequence
  Description of Artificial Sequence: Synthetic peptide
ETDYGDYGAFDI

SEQ ID NO: 1239 - protein, 124 aa, Artificial Sequence
  Description of Artificial Sequence: Synthetic polypeptide
EVQLQQSGPGLVKPSQTLSLTCAISGDSVSNNNAAWNWIRQSPSRGLEWLGRTYHRSTWYNDYVGSVKSRITINPDTSKNQFSLQLNSVTPEDTAVYYCARETDYGDYGAFDIWGQGTTVTVSS

SEQ ID NO: 1240 - protein, 14 aa, Artificial Sequence
  Description of Artificial Sequence: Synthetic peptide
TGSRNDIGAYESVS

SEQ ID NO: 1241 - protein, 7 aa, Artificial Sequence
  Description of Artificial Sequence: Synthetic peptide
GVNNRPS

SEQ ID NO: 1242 - protein, 11 aa, Artificial Sequence
  Description of Artificial Sequence: Synthetic peptide
SSHTTTSTLYV

SEQ ID NO: 1243 - protein, 10 aa, Artificial Sequence
  Description of Artificial Sequence: Synthetic peptide
SRNDIGAYES

SEQ ID NO: 1244 - protein, 3 aa, Artificial Sequence
  Description of Artificial Sequence: Synthetic peptide
GVN

SEQ ID NO: 1245 - protein, 8 aa, Artificial Sequence
  Description of Artificial Sequence: Synthetic peptide
HTTTSTLY

SEQ ID NO: 1246 - protein, 9 aa, Artificial Sequence
  Description of Artificial Sequence: Synthetic peptide
RNDIGAYES

SEQ ID NO: 1247 - protein, 3 aa, Artificial Sequence
  Description of Artificial Sequence: Synthetic peptide
GVN

SEQ ID NO: 1248 - protein, 11 aa, Artificial Sequence
  Description of Artificial Sequence: Synthetic peptide
SSHTTTSTLYV

SEQ ID NO: 1249 - protein, 14 aa, Artificial Sequence
  Description of Artificial Sequence: Synthetic peptide
TGSRNDIGAYESVS

SEQ ID NO: 1250 - protein, 7 aa, Artificial Sequence
  Description of Artificial Sequence: Synthetic peptide
GVNNRPS

SEQ ID NO: 1251 - protein, 11 aa, Artificial Sequence
  Description of Artificial Sequence: Synthetic peptide
SSHTTTSTLYV

SEQ ID NO: 1252 - protein, 111 aa, Artificial Sequence
  Description of Artificial Sequence: Synthetic polypeptide
QSALTQPASVSGSPGQSITISCTGSRNDIGAYESVSWYQQHPGNAPKLIIHGVNNRPSGVFDRFSVSQSGNTASLTISGLQAEDEADYYCSSHTTTSTLYVFGTGTKVTVL

SEQ ID NO: 1253 - protein, 250 aa, Artificial Sequence
  Description of Artificial Sequence: Synthetic polypeptide
EVQLQQSGPGLVKPSQTLSLTCAISGDSVSNNNAAWNWIRQSPSRGLEWLGRTYHRSTWYNDYVGSVKSRITINPDTSKNQFSLQLNSVTPEDTAVYYCARETDYGDYGAFDIWGQGTTVTVSSGGGGSGGGGSGGGGSQSALTQPASVSGSPGQSITISCTGSRNDIGAYESVSWYQQHPGNAPKLIIHGVNNRPSGVFDRFSVSQSGNTASLTISGLQAEDEADYYCSSHTTTSTLYVFGTGTKVTVL

SEQ ID NO: 1254 - protein, 7 aa, Artificial Sequence
  Description of Artificial Sequence: Synthetic peptide
SNSAAWN

SEQ ID NO: 1255 - protein, 18 aa, Artificial Sequence
  Description of Artificial Sequence: Synthetic peptide
RTFYRSKWYNDYAVSVKG

SEQ ID NO: 1256 - protein, 9 aa, Artificial Sequence
  Description of Artificial Sequence: Synthetic peptide
GDYYYGLDV

SEQ ID NO: 1257 - protein, 9 aa, Artificial Sequence
  Description of Artificial Sequence: Synthetic peptide
GDSVSSNSA

SEQ ID NO: 1258 - protein, 7 aa, Artificial Sequence
  Description of Artificial Sequence: Synthetic peptide
FYRSKWY

SEQ ID NO: 1259 - protein, 9 aa, Artificial Sequence
  Description of Artificial Sequence: Synthetic peptide
GDYYYGLDV

SEQ ID NO: 1260 - protein, 10 aa, Artificial Sequence
  Description of Artificial Sequence: Synthetic peptide
GDSVSSNSAA

SEQ ID NO: 1261 - protein, 9 aa, Artificial Sequence
  Description of Artificial Sequence: Synthetic peptide
TFYRSKWYN

SEQ ID NO: 1262 - protein, 11 aa, Artificial Sequence
  Description of Artificial Sequence: Synthetic peptide
AGGDYYYGLDV

SEQ ID NO: 1263 - protein, 12 aa, Artificial Sequence
  Description of Artificial Sequence: Synthetic peptide
GDSVSSNSAAWN

SEQ ID NO: 1264 - protein, 18 aa, Artificial Sequence
  Description of Artificial Sequence: Synthetic peptide
RTFYRSKWYNDYAVSVKG

SEQ ID NO: 1265 - protein, 9 aa, Artificial Sequence
  Description of Artificial Sequence: Synthetic peptide
GDYYYGLDV

SEQ ID NO: 1266 - protein, 121 aa, Artificial Sequence
  Description of Artificial Sequence: Synthetic polypeptide
EVQLQQSGPGLVNPSQTLSITCAISGDSVSSNSAAWNWIRQSPSRGLEWLGRTFYRSKWYNDYAVSVKGRITISPDTSKNQFSLQLNSVTPEDTAVYYCAGGDYYYGLDVWGQGTTVTVSS

SEQ ID NO: 1267 - protein, 14 aa, Artificial Sequence
  Description of Artificial Sequence: Synthetic peptide
TGSSSDVGGYNSVS

SEQ ID NO: 1268 - protein, 7 aa, Artificial Sequence
  Description of Artificial Sequence: Synthetic peptide
EVINRPS

SEQ ID NO: 1269 - protein, 10 aa, Artificial Sequence
  Description of Artificial Sequence: Synthetic peptide
SSYTSSSTYV

SEQ ID NO: 1270 - protein, 10 aa, Artificial Sequence
  Description of Artificial Sequence: Synthetic peptide
SSSDVGGYNS

SEQ ID NO: 1271 - protein, 3 aa, Artificial Sequence
  Description of Artificial Sequence: Synthetic peptide
EVI

SEQ ID NO: 1272 - protein, 7 aa, Artificial Sequence
  Description of Artificial Sequence: Synthetic peptide
YTSSSTY

SEQ ID NO: 1273 - protein, 9 aa, Artificial Sequence
  Description of Artificial Sequence: Synthetic peptide
SSDVGGYNS

SEQ ID NO: 1274 - protein, 3 aa, Artificial Sequence
  Description of Artificial Sequence: Synthetic peptide
EVI

SEQ ID NO: 1275 - protein, 10 aa, Artificial Sequence
  Description of Artificial Sequence: Synthetic peptide
SSYTSSSTYV

SEQ ID NO: 1276 - protein, 14 aa, Artificial Sequence
  Description of Artificial Sequence: Synthetic peptide
TGSSSDVGGYNSVS

SEQ ID NO: 1277 - protein, 7 aa, Artificial Sequence
  Description of Artificial Sequence: Synthetic peptide
EVINRPS

SEQ ID NO: 1278 - protein, 10 aa, Artificial Sequence
  Description of Artificial Sequence: Synthetic peptide
SSYTSSSTYV

SEQ ID NO: 1279 - protein, 110 aa, Artificial Sequence
  Description of Artificial Sequence: Synthetic polypeptide
QSALTQPASVSGSPGQSITISCTGSSSDVGGYNSVSWYQQHPGKAPKLMIYEVINRPSGVSHRFSGSKSGNTASLTISGLQAEDEADYYCSSYTSSSTYVFGTGTKVTVL

SEQ ID NO: 1280 - protein, 246 aa, Artificial Sequence
  Description of Artificial Sequence: Synthetic polypeptide
EVQLQQSGPGLVNPSQTLSITCAISGDSVSSNSAAWNWIRQSPSRGLEWLGRTFYRSKWYNDYAVSVKGRITISPDTSKNQFSLQLNSVTPEDTAVYYCAGGDYYYGLDVWGQGTTVTVSSGGGGSGGGGSGGGGSQSALTQPASVSGSPGQSITISCTGSSSDVGGYNSVSWYQQHPGKAPKLMIYEVINRPSGVSHRFSGSKSGNTASLTISGLQAEDEADYYCSSYTSSSTYVFGTGTKVTVL

SEQ ID NO: 1281 - protein, 7 aa, Artificial Sequence
  Description of Artificial Sequence: Synthetic peptide
SNSDTWN

SEQ ID NO: 1282 - protein, 18 aa, Artificial Sequence
  Description of Artificial Sequence: Synthetic peptide
RTYHRSTWYDDYASSVRG

SEQ ID NO: 1283 - protein, 15 aa, Artificial Sequence
  Description of Artificial Sequence: Synthetic peptide
DRLQDGNSWSDAFDV

SEQ ID NO: 1284 - protein, 9 aa, Artificial Sequence
  Description of Artificial Sequence: Synthetic peptide
GDSVLSNSD

SEQ ID NO: 1285 - protein, 7 aa, Artificial Sequence
  Description of Artificial Sequence: Synthetic peptide
YHRSTWY

SEQ ID NO: 1286 - protein, 15 aa, Artificial Sequence
  Description of Artificial Sequence: Synthetic peptide
DRLQDGNSWSDAFDV

SEQ ID NO: 1287 - protein, 10 aa, Artificial Sequence
  Description of Artificial Sequence: Synthetic peptide
GDSVLSNSDT

SEQ ID NO: 1288 - protein, 9 aa, Artificial Sequence
  Description of Artificial Sequence: Synthetic peptide
TYHRSTWYD

SEQ ID NO: 1289 - protein, 17 aa, Artificial Sequence
  Description of Artificial Sequence: Synthetic peptide
ARDRLQDGNSWSDAFDV

SEQ ID NO: 1290 - protein, 12 aa, Artificial Sequence
  Description of Artificial Sequence: Synthetic peptide
GDSVLSNSDTWN

SEQ ID NO: 1291 - protein, 18 aa, Artificial Sequence
  Description of Artificial Sequence: Synthetic peptide
RTYHRSTWYDDYASSVRG

SEQ ID NO: 1292 - protein, 15 aa, Artificial Sequence
  Description of Artificial Sequence: Synthetic peptide
DRLQDGNSWSDAFDV

SEQ ID NO: 1293 - protein, 127 aa, Artificial Sequence
  Description of Artificial Sequence: Synthetic polypeptide
EVQLQQSGPGLVKPSQTLSLTCAISGDSVLSNSDTWNWIRQSPSRGLEWLGRTYHRSTWYDDYASSVRGRVSINVDTSKNQYSLQLNAVTPEDTGVYYCARDRLQDGNSWSDAFDVWGQGTMVTVSS

SEQ ID NO: 1294 - protein, 14 aa, Artificial Sequence
  Description of Artificial Sequence: Synthetic peptide
TGSSSDIGGFNYVS

SEQ ID NO: 1295 - protein, 7 aa, Artificial Sequence
  Description of Artificial Sequence: Synthetic peptide
EVTNRPS

SEQ ID NO: 1296 - protein, 11 aa, Artificial Sequence
  Description of Artificial Sequence: Synthetic peptide
SSYASGSPLYV

SEQ ID NO: 1297 - protein, 10 aa, Artificial Sequence
  Description of Artificial Sequence: Synthetic peptide
SSSDIGGFNY

SEQ ID NO: 1298 - protein, 3 aa, Artificial Sequence
  Description of Artificial Sequence: Synthetic peptide
EVT

SEQ ID NO: 1299 - protein, 8 aa, Artificial Sequence
  Description of Artificial Sequence: Synthetic peptide
YASGSPLY

SEQ ID NO: 1300 - protein, 9 aa, Artificial Sequence
  Description of Artificial Sequence: Synthetic peptide
SSDIGGFNY

SEQ ID NO: 1301 - protein, 3 aa, Artificial Sequence
  Description of Artificial Sequence: Synthetic peptide
EVT

SEQ ID NO: 1302 - protein, 11 aa, Artificial Sequence
  Description of Artificial Sequence: Synthetic peptide
SSYASGSPLYV

SEQ ID NO: 1303 - protein, 14 aa, Artificial Sequence
  Description of Artificial Sequence: Synthetic peptide
TGSSSDIGGFNYVS

SEQ ID NO: 1304 - protein, 7 aa, Artificial Sequence
  Description of Artificial Sequence: Synthetic peptide
EVTNRPS

SEQ ID NO: 1305 - protein, 11 aa, Artificial Sequence
  Description of Artificial Sequence: Synthetic peptide
SSYASGSPLYV

SEQ ID NO: 1306 - protein, 111 aa, Artificial Sequence
  Description of Artificial Sequence: Synthetic polypeptide
QSALTQPASVSGSPGQSITISCTGSSSDIGGFNYVSWYQQHAGEAPKLMIYEVTNRPSGVSDRFSGSKSDNTASLTISGLQAEDEADYYCSSYASGSPLYVFGTGTKVTVL

SEQ ID NO: 1307 - protein, 253 aa, Artificial Sequence
  Description of Artificial Sequence: Synthetic polypeptide
EVQLQQSGPGLVKPSQTLSLTCAISGDSVLSNSDTWNWIRQSPSRGLEWLGRTYHRSTWYDDYASSVRGRVSINVDTSKNQYSLQLNAVTPEDTGVYYCARDRLQDGNSWSDAFDVWGQGTMVTVSSGGGGSGGGGSGGGGSQSALTQPASVSGSPGQSITISCTGSSSDIGGFNYVSWYQQHAGEAPKLMIYEVTNRPSGVSDRFSGSKSDNTASLTISGLQAEDEADYYCSSYASGSPLYVFGTGTKVTVL

SEQ ID NO: 1308 - protein, 7 aa, Artificial Sequence
  Description of Artificial Sequence: Synthetic peptide
SNSDTWN

SEQ ID NO: 1309 - protein, 18 aa, Artificial Sequence
  Description of Artificial Sequence: Synthetic peptide
RTYHRSTWYDDYASSVRG

SEQ ID NO: 1310 - protein, 15 aa, Artificial Sequence
  Description of Artificial Sequence: Synthetic peptide
DRLQDGNSWSDAFDV

SEQ ID NO: 1311 - protein, 9 aa, Artificial Sequence
  Description of Artificial Sequence: Synthetic peptide
GDSVLSNSD

SEQ ID NO: 1312 - protein, 7 aa, Artificial Sequence
  Description of Artificial Sequence: Synthetic peptide
YHRSTWY

SEQ ID NO: 1313 - protein, 15 aa, Artificial Sequence
  Description of Artificial Sequence: Synthetic peptide
DRLQDGNSWSDAFDV

SEQ ID NO: 1314 - protein, 10 aa, Artificial Sequence
  Description of Artificial Sequence: Synthetic peptide
GDSVLSNSDT

SEQ ID NO: 1315 - protein, 9 aa, Artificial Sequence
  Description of Artificial Sequence: Synthetic peptide
TYHRSTWYD

SEQ ID NO: 1316 - protein, 17 aa, Artificial Sequence
  Description of Artificial Sequence: Synthetic peptide
ARDRLQDGNSWSDAFDV

SEQ ID NO: 1317 - protein, 12 aa, Artificial Sequence
  Description of Artificial Sequence: Synthetic peptide
GDSVLSNSDTWN

SEQ ID NO: 1318 - protein, 18 aa, Artificial Sequence
  Description of Artificial Sequence: Synthetic peptide
RTYHRSTWYDDYASSVRG

SEQ ID NO: 1319 - protein, 15 aa, Artificial Sequence
  Description of Artificial Sequence: Synthetic peptide
DRLQDGNSWSDAFDV

SEQ ID NO: 1320 - protein, 127 aa, Artificial Sequence; identical to SEQ ID NO: 1293
  Description of Artificial Sequence: Synthetic polypeptide

SEQ ID NO: 1321 - protein, 14 aa, Artificial Sequence
  Description of Artificial Sequence: Synthetic peptide
TGTSSDIGGYNYVS

SEQ ID NO: 1322 - protein, 7 aa, Artificial Sequence
  Description of Artificial Sequence: Synthetic peptide
EVSNRPS

SEQ ID NO: 1323 - protein, 11 aa, Artificial Sequence
  Description of Artificial Sequence: Synthetic peptide
SSYTSSSTLYV

SEQ ID NO: 1324 - protein, 10 aa, Artificial Sequence
  Description of Artificial Sequence: Synthetic peptide
TSSDIGGYNY

SEQ ID NO: 1325 - protein, 3 aa, Artificial Sequence
  Description of Artificial Sequence: Synthetic peptide
EVS

SEQ ID NO: 1326 - protein, 8 aa, Artificial Sequence
  Description of Artificial Sequence: Synthetic peptide
YTSSSTLY

SEQ ID NO: 1327 - protein, 9 aa, Artificial Sequence
  Description of Artificial Sequence: Synthetic peptide
SSDIGGYNY

SEQ ID NO: 1328 - protein, 3 aa, Artificial Sequence
  Description of Artificial Sequence: Synthetic peptide
EVS

SEQ ID NO: 1329 - protein, 11 aa, Artificial Sequence
  Description of Artificial Sequence: Synthetic peptide
SSYTSSSTLYV

SEQ ID NO: 1330 - protein, 14 aa, Artificial Sequence
  Description of Artificial Sequence: Synthetic peptide
TGTSSDIGGYNYVS

SEQ ID NO: 1331 - protein, 7 aa, Artificial Sequence
  Description of Artificial Sequence: Synthetic peptide
EVSNRPS

SEQ ID NO: 1332 - protein, 11 aa, Artificial Sequence
  Description of Artificial Sequence: Synthetic peptide
SSYTSSSTLYV

SEQ ID NO: 1333 - protein, 111 aa, Artificial Sequence
  Description of Artificial Sequence: Synthetic polypeptide
QSALTQPASVSGSPGQSITFSCTGTSSDIGGYNYVSWYQQHPGKAPKLMIYEVSNRPSGVSNRFSGTKSGNTASLTISGLQAEDEADYYCSSYTSSSTLYVFGTGTKLTVL

SEQ ID NO: 1334 - protein, 253 aa, Artificial Sequence
  Description of Artificial Sequence: Synthetic polypeptide
EVQLQQSGPGLVKPSQTLSLTCAISGDSVLSNSDTWNWIRQSPSRGLEWLGRTYHRSTWYDDYASSVRGRVSINVDTSKNQYSLQLNAVTPEDTGVYYCARDRLQDGNSWSDAFDVWGQGTMVTVSSGGGGSGGGGSGSGGSQSALTQPASVSGSPGQSITFSCTGTSSDIGGYNYVSWYQQHPGKAPKLMIYEVSNRPSGVSNRFSGTKSGNTASLTISGLQAEDEADYYCSSYTSSSTLYVFGTGTKLTVL

SEQ ID NO: 1335 - protein, 7 aa, Artificial Sequence
  Description of Artificial Sequence: Synthetic peptide
SNSDTWN

SEQ ID NO: 1336 - protein, 18 aa, Artificial Sequence
  Description of Artificial Sequence: Synthetic peptide
RTYHRSTWYDDYASSVRG

SEQ ID NO: 1337 - protein, 15 aa, Artificial Sequence
  Description of Artificial Sequence: Synthetic peptide
DRLQDGNSWSDAFDV

SEQ ID NO: 1338 - protein, 9 aa, Artificial Sequence
  Description of Artificial Sequence: Synthetic peptide
GDSVLSNSD

SEQ ID NO: 1339 - protein, 7 aa, Artificial Sequence
  Description of Artificial Sequence: Synthetic peptide
YHRSTWY

SEQ ID NO: 1340 - protein, 15 aa, Artificial Sequence
  Description of Artificial Sequence: Synthetic peptide
DRLQDGNSWSDAFDV

SEQ ID NO: 1341 - protein, 10 aa, Artificial Sequence
  Description of Artificial Sequence: Synthetic peptide
GDSVLSNSDT

SEQ ID NO: 1342 - protein, 9 aa, Artificial Sequence
  Description of Artificial Sequence: Synthetic peptide
TYHRSTWYD

SEQ ID NO: 1343 - protein, 17 aa, Artificial Sequence
  Description of Artificial Sequence: Synthetic peptide
ARDRLQDGNSWSDAFDV

SEQ ID NO: 1344 - protein, 12 aa, Artificial Sequence
  Description of Artificial Sequence: Synthetic peptide
GDSVLSNSDTWN

SEQ ID NO: 1345 - protein, 18 aa, Artificial Sequence
  Description of Artificial Sequence: Synthetic peptide
RTYHRSTWYDDYASSVRG

SEQ ID NO: 1346 - protein, 15 aa, Artificial Sequence
  Description of Artificial Sequence: Synthetic peptide
DRLQDGNSWSDAFDV

SEQ ID NO: 1347 - protein, 127 aa, Artificial Sequence
  Description of Artificial Sequence: Synthetic polypeptide
QVQLQESGPGLVKPSQTLSLTCAISGDSVLSNSDTWNWIRQSPSRGLEWLGRTYHRSTWYDDYASSVRGRVSINVDTSKNQYSLQLNAVTPEDTGVYYCARDRLQDGNSWSDAFDVWGQGTMVTVSS

SEQ ID NO: 1348 - protein, 14 aa, Artificial Sequence
  Description of Artificial Sequence: Synthetic peptide
TGTSSDVGGYNYVS

SEQ ID NO: 1349 - protein, 7 aa, Artificial Sequence
  Description of Artificial Sequence: Synthetic peptide
EVSNRPS

SEQ ID NO: 1350 - protein, 11 aa, Artificial Sequence
  Description of Artificial Sequence: Synthetic peptide
SSYTSSSTLYV

SEQ ID NO: 1351 - protein, 10 aa, Artificial Sequence
  Description of Artificial Sequence: Synthetic peptide
TSSDVGGYNY

SEQ ID NO: 1352 - protein, 3 aa, Artificial Sequence
  Description of Artificial Sequence: Synthetic peptide
EVS

SEQ ID NO: 1353 - protein, 8 aa, Artificial Sequence
  Description of Artificial Sequence: Synthetic peptide
YTSSSTLY

SEQ ID NO: 1354 - protein, 9 aa, Artificial Sequence
  Description of Artificial Sequence: Synthetic peptide
SSDVGGYNY

SEQ ID NO: 1355 - protein, 3 aa, Artificial Sequence
  Description of Artificial Sequence: Synthetic peptide
EVS

SEQ ID NO: 1356 - protein, 11 aa, Artificial Sequence
  Description of Artificial Sequence: Synthetic peptide
SSYTSSSTLYV

SEQ ID NO: 1357 - protein, 14 aa, Artificial Sequence
  Description of Artificial Sequence: Synthetic peptide
TGTSSDVGGYNYVS

SEQ ID NO: 1358 - protein, 7 aa, Artificial Sequence
  Description of Artificial Sequence: Synthetic peptide
EVSNRPS

SEQ ID NO: 1359 - protein, 11 aa, Artificial Sequence
  Description of Artificial Sequence: Synthetic peptide
SSYTSSSTLYV

SEQ ID NO: 1360 - protein, 111 aa, Artificial Sequence
  Description of Artificial Sequence: Synthetic polypeptide
QSALTQPASVSGSPGQSITISCTGTSSDVGGYNYVSWYQQHPGKAPKLMIYEVSNRPSGVSNRFSGSKSGNTASLTISGLQAEDEADYYCSSYTSSSTLYVFGTGTKVTVL

SEQ ID NO: 1361 - protein, 253 aa, Artificial Sequence
  Description of Artificial Sequence: Synthetic polypeptide
QVQLQESGPGLVKPSQTLSLTCAISGDSVLSNSDTWNWIRQSPSRGLEWLGRTYHRSTWYDDYASSVRGRVSINVDTSKNQYSLQLNAVTPEDTGVYYCARDRLQDGNSWSDAFDVWGQGTMVTVSSGGGGSGGGGSGSGGSQSALTQPASVSGSPGQSITISCTGTSSDVGGYNYVSWYQQHPGKAPKLMIYEVSNRPSGVSNRFSGSKSGNTASLTISGLQAEDEADYYCSSYTSSSTLYVFGTGTKVTVL

SEQ ID NO: 1362 - protein, 7 aa, Artificial Sequence
  Description of Artificial Sequence: Synthetic peptide
SNSDTWN

SEQ ID NO: 1363 - protein, 18 aa, Artificial Sequence
  Description of Artificial Sequence: Synthetic peptide
RTYHRSTWYDDYASSVRG

SEQ ID NO: 1364 - protein, 15 aa, Artificial Sequence
  Description of Artificial Sequence: Synthetic peptide
DRLQDGNSWSDAFDV

SEQ ID NO: 1365 - protein, 9 aa, Artificial Sequence
  Description of Artificial Sequence: Synthetic peptide
GDSVLSNSD

SEQ ID NO: 1366 - protein, 7 aa, Artificial Sequence
  Description of Artificial Sequence: Synthetic peptide
YHRSTWY

SEQ ID NO: 1367 - protein, 15 aa, Artificial Sequence
  Description of Artificial Sequence: Synthetic peptide
DRLQDGNSWSDAFDV

SEQ ID NO: 1368 - protein, 10 aa, Artificial Sequence
  Description of Artificial Sequence: Synthetic peptide
GDSVLSNSDT

SEQ ID NO: 1369 - protein, 9 aa, Artificial Sequence
  Description of Artificial Sequence: Synthetic peptide
TYHRSTWYD

SEQ ID NO: 1370 - protein, 17 aa, Artificial Sequence
  Description of Artificial Sequence: Synthetic peptide
ARDRLQDGNSWSDAFDV

SEQ ID NO: 1371 - protein, 12 aa, Artificial Sequence
  Description of Artificial Sequence: Synthetic peptide
GDSVLSNSDTWN

SEQ ID NO: 1372 - protein, 18 aa, Artificial Sequence
  Description of Artificial Sequence: Synthetic peptide
RTYHRSTWYDDYASSVRG

SEQ ID NO: 1373 - protein, 15 aa, Artificial Sequence
  Description of Artificial Sequence: Synthetic peptide
DRLQDGNSWSDAFDV

SEQ ID NO: 1374 - protein, 127 aa, Artificial Sequence; identical to SEQ ID NO: 1293
  Description of Artificial Sequence: Synthetic polypeptide

SEQ ID NO: 1375 - protein, 14 aa, Artificial Sequence
  Description of Artificial Sequence: Synthetic peptide
TGTSSDVGGYNYVS

SEQ ID NO: 1376 - protein, 7 aa, Artificial Sequence
  Description of Artificial Sequence: Synthetic peptide
DVSNRPS

SEQ ID NO: 1377 - protein, 11 aa, Artificial Sequence
  Description of Artificial Sequence: Synthetic peptide
SSYTSSSTLYV

SEQ ID NO: 1378 - protein, 10 aa, Artificial Sequence
  Description of Artificial Sequence: Synthetic peptide
TSSDVGGYNY

SEQ ID NO: 1379 - protein, 3 aa, Artificial Sequence
  Description of Artificial Sequence: Synthetic peptide
DVS

SEQ ID NO: 1380 - protein, 8 aa, Artificial Sequence
  Description of Artificial Sequence: Synthetic peptide
YTSSSTLY

SEQ ID NO: 1381 - protein, 9 aa, Artificial Sequence
  Description of Artificial Sequence: Synthetic peptide
SSDVGGYNY

SEQ ID NO: 1382 - protein, 3 aa, Artificial Sequence
  Description of Artificial Sequence: Synthetic peptide
DVS

SEQ ID NO: 1383 - protein, 11 aa, Artificial Sequence
  Description of Artificial Sequence: Synthetic peptide
SSYTSSSTLYV

SEQ ID NO: 1384 - protein, 14 aa, Artificial Sequence
  Description of Artificial Sequence: Synthetic peptide
TGTSSDVGGYNYVS

SEQ ID NO: 1385 - protein, 7 aa, Artificial Sequence
  Description of Artificial Sequence: Synthetic peptide
DVSNRPS

SEQ ID NO: 1386 - protein, 11 aa, Artificial Sequence
  Description of Artificial Sequence: Synthetic peptide
SSYTSSSTLYV

SEQ ID NO: 1387 - protein, 111 aa, Artificial Sequence
  Description of Artificial Sequence: Synthetic polypeptide
QSALTQPASVSGSPGQSITISCTGTSSDVGGYNYVSWYQQHPGKAPKLMIYDVSNRPSGVSNRFSGSKSGNTASLTISGLQAEDEADYYCSSYTSSSTLYVFGTGTKVTVL

SEQ ID NO: 1388 - protein, 253 aa, Artificial Sequence
  Description of Artificial Sequence: Synthetic polypeptide
EVQLQQSGPGLVKPSQTLSLTCAISGDSVLSNSDTWNWIRQSPSRGLEWLGRTYHRSTWYDDYASSVRGRVSINVDTSKNQYSLQLNAVTPEDTGVYYCARDRLQDGNSWSDAFDVWGQGTMVTVSSGGGGSGGGGSGGGGSQSALTQPASVSGSPGQSITISCTGTSSDVGGYNYVSWYQQHPGKAPKLMIYDVSNRPSGVSNRFSGSKSGNTASLTISGLQAEDEADYYCSSYTSSSTLYVFGTGTKVTVL

SEQ ID NO: 1389 - protein, 7 aa, Artificial Sequence
  Description of Artificial Sequence: Synthetic peptide
SNSDTWN

SEQ ID NO: 1390 - protein, 18 aa, Artificial Sequence
  Description of Artificial Sequence: Synthetic peptide
RTYHRSTWYDDYASSVRG

SEQ ID NO: 1391 - protein, 15 aa, Artificial Sequence
  Description of Artificial Sequence: Synthetic peptide
DRLQDGNSWSDAFDV

SEQ ID NO: 1392 - protein, 9 aa, Artificial Sequence
  Description of Artificial Sequence: Synthetic peptide
GDSVLSNSD

SEQ ID NO: 1393 - protein, 7 aa, Artificial Sequence
  Description of Artificial Sequence: Synthetic peptide
YHRSTWY

SEQ ID NO: 1394 - protein, 15 aa, Artificial Sequence
  Description of Artificial Sequence: Synthetic peptide
DRLQDGNSWSDAFDV

SEQ ID NO: 1395 - protein, 10 aa, Artificial Sequence
  Description of Artificial Sequence: Synthetic peptide
GDSVLSNSDT

SEQ ID NO: 1396 - protein, 9 aa, Artificial Sequence
  Description of Artificial Sequence: Synthetic peptide
TYHRSTWYD

SEQ ID NO: 1397 - protein, 17 aa, Artificial Sequence
  Description of Artificial Sequence: Synthetic peptide
ARDRLQDGNSWSDAFDV

SEQ ID NO: 1398 - protein, 12 aa, Artificial Sequence
  Description of Artificial Sequence: Synthetic peptide
GDSVLSNSDTWN

SEQ ID NO: 1399 - protein, 18 aa, Artificial Sequence
  Description of Artificial Sequence: Synthetic peptide
RTYHRSTWYDDYASSVRG

SEQ ID NO: 1400 - protein, 15 aa, Artificial Sequence
  Description of Artificial Sequence: Synthetic peptide
DRLQDGNSWSDAFDV

SEQ ID NO: 1401 - protein, 127 aa, Artificial Sequence; identical to SEQ ID NO: 1293
  Description of Artificial Sequence: Synthetic polypeptide

SEQ ID NO: 1402 - protein, 14 aa, Artificial Sequence
  Description of Artificial Sequence: Synthetic peptide
TGTSSDVGGYNYVS

SEQ ID NO: 1403 - protein, 7 aa, Artificial Sequence
  Description of Artificial Sequence: Synthetic peptide
EVSNRPS

SEQ ID NO: 1404 - protein, 11 aa, Artificial Sequence
  Description of Artificial Sequence: Synthetic peptide
SSYTSSSTLYI

SEQ ID NO: 1405 - protein, 10 aa, Artificial Sequence
  Description of Artificial Sequence: Synthetic peptide
TSSDVGGYNY

SEQ ID NO: 1406 - protein, 3 aa, Artificial Sequence
  Description of Artificial Sequence: Synthetic peptide
EVS

SEQ ID NO: 1407 - protein, 8 aa, Artificial Sequence
  Description of Artificial Sequence: Synthetic peptide
YTSSSTLY

SEQ ID NO: 1408 - protein, 9 aa, Artificial Sequence
  Description of Artificial Sequence: Synthetic peptide
SSDVGGYNY

SEQ ID NO: 1409 - protein, 3 aa, Artificial Sequence
  Description of Artificial Sequence: Synthetic peptide
EVS

SEQ ID NO: 1410 - protein, 11 aa, Artificial Sequence
  Description of Artificial Sequence: Synthetic peptide
SSYTSSSTLYI

SEQ ID NO: 1411 - protein, 14 aa, Artificial Sequence
  Description of Artificial Sequence: Synthetic peptide
TGTSSDVGGYNYVS

SEQ ID NO: 1412 - protein, 7 aa, Artificial Sequence
  Description of Artificial Sequence: Synthetic peptide
EVSNRPS

SEQ ID NO: 1413 - protein, 11 aa, Artificial Sequence
  Description of Artificial Sequence: Synthetic peptide
SSYTSSSTLYI

SEQ ID NO: 1414 - protein, 111 aa, Artificial Sequence
  Description of Artificial Sequence: Synthetic polypeptide
QSALTQPASVSGSPGQSITISCTGTSSDVGGYNYVSWYQQHPGKAPKLMIYEVSNRPSGVSNRFSGSKSGNTASLTISGLQAEDEADYYCSSYTSSSTLYIFGTGTKVTVL

SEQ ID NO: 1415 - protein, 253 aa, Artificial Sequence
  Description of Artificial Sequence: Synthetic polypeptide
EVQLQQSGPGLVKPSQTLSLTCAISGDSVLSNSDTWNWIRQSPSRGLEWLGRTYHRSTWYDDYASSVRGRVSINVDTSKNQYSLQLNAVTPEDTGVYYCARDRLQDGNSWSDAFDVWGQGTMVTVSSGGGGSGGGGSGGGGSQSALTQPASVSGSPGQSITISCTGTSSDVGGYNYVSWYQQHPGKAPKLMIYEVSNRPSGVSNRFSGSKSGNTASLTISGLQAEDEADYYCSSYTSSSTLYIFGTGTKVTVL

SEQ ID NO: 1416 - protein, 242 aa, Artificial Sequence
  Description of Artificial Sequence: Synthetic polypeptide
EIVMTQSPATLSLSPGERATLSCRASQDISKYLNWYQQKPGQAPRLLIYHTSRLHSGIPARFSGSGSGTDYTLTISSLQPEDFAVYFCQQGNTLPYTFGQGTKLEIKGGGGSGGGGSGGGGSQVQLQESGPGLVKPSETLSLTCTVSGVSLPDYGVSWIRQPPGKGLEWIGVIWGSETTYYQSSLKSRVTISKDNSKNQVSLKLSSVTAADTAVYYCAKHYYYGGSYAMDYWGQGTLVTVSS

What is claimed is:

1. A method of manufacturing a lentiviral vector, comprising:
a) providing a plurality of mammalian (e.g., human) cells,
b) contacting the plurality of mammalian cells with:
i) FectoVIR®-AAV transfection reagent, and
ii) nucleic acid encoding a therapeutic effector, e.g., a therapeutic protein (e.g., a CAR) and sufficient LTR sequence for packaging into a viral particle, and optionally nucleic acid encoding a lentiviral packaging protein, a lentiviral envelope protein, and,
under conditions that allow the nucleic acid to be introduced into at least a subset of the cells; and
c) culturing the cell under conditions suitable for production of the lentiviral vector.

2. The method of claim 1, which when the plurality of mammalian cells is in a 50 L culture yields a number of transducing units per ml culture that is no less than 50%, 60%, 70%, or 80% the number of transducing units per ml culture in an otherwise similar 100 ml culture.

3. The method of claim 1 or 2, which yields at least 1×10⁷ or 3×10⁷ or at least 1×10⁸ transducing units when used under conditions described in Example 5.

4. The method of any of claims 1-3, which yields a ratio of equal to or less than 1188:1, 953:1, and 1800:1 PP (physical particles): IP (infectious particles).

5. The method of claim 1 or 2, wherein the mammalian cells are 293 cells, e.g., Expi293F cells.

6. The method of any of claims 1-5, wherein the FectoVIR®-AAV is used at a concentration of 0.3-0.6 μl FectoVIR®-AAV/million cells, e.g., about 0.4 μl/million cells.

7. The method of any of claims 1-6, wherein the nucleic acid is used at a concentration of 0.3-0.6 μg of nucleic acid/million cells, e.g., about 0.4 μg/million cells.

8. The method of any of claims 1-7 wherein the ratio of FectoVIR®-AAV: DNA for transfection 1:0.5 to 1:2, e.g., about 1:1 (wherein optionally the DNA for transfection comprises DNA encoding the therapeutic effector, DNA encoding one or more retroviral packaging protein and DNA encoding a retroviral envelope protein).

9. The method of any of claims 1-8, wherein the FectoVIR®-AAV transfection reagent is complexed with the nucleic acid.

10. The method of any of claims 1-9, which further comprises admixing the FectoVIR®-AAV transfection reagent with the nucleic acid before step b).

11. The method of claim 9 or 10, wherein complexation volume of the transfection reagent and the nucleic acid is between about 1% and about 15%, e.g., about 1% and about 10% (e.g., about 5-7.5% or 7.5-10%).

12. The method of claim 11, wherein the complexation volume is 3-7%, 4-6%, or about 5%.

13. The method of any one of claims 10-12, wherein the FectoVIR®-AAV transfection reagent and the nucleic acid are incubated for sufficient time to allow complexation to occur, e.g., about 10-90 minutes, e.g., 15-60, e.g., 15-30, 30-45, or 45-60 minutes.

14. A method of manufacturing a lentiviral vector, comprising:
a) culturing a plurality of mammalian (e.g., human) cells at a pH of above about 6.9 or about 6.9-7.3, e.g., about 7.0-7.1;
b) subsequently to step a), adjusting the pH of the culture to about 6.0-6.8, e.g., 6.6-6.8, e.g., about 6.7;
c) subsequently to step b), contacting the culture with a transfection reagent and DNA.

15. The method of claim 14, wherein the transfection reagent comprises FectoVIR®-AAV transfection reagent.

16. The method of claim 14 or 15, wherein the DNA encodes one or more retroviral packaging protein, a retroviral envelope protein, and a therapeutic effector, e.g., a therapeutic protein (e.g., a CAR).

17. The method of any of claims 14-16, wherein a) comprises culturing the cells for about 2-4 days, e.g., about 3 days.

18. The method of any of claims 14-17, which further comprises an additional step of culturing the cells between steps b) and c).

19. The method of any of claims 14-18, which further comprises an additional step of culturing the cells after step c).

20. The method of any of claims 14-19, wherein step b) comprises lowering the pH by about 0.1, 0.2, 0.3, 0.4, 0.5, 0.6, 0.7, 0.8, 0.9, or 1.

21. The method of any one of claims 1-20, wherein prior to step a), the plurality of mammalian cells are inoculated at between 0.1×10⁶ cells/mL—and 0.3×10⁶ cells/mL (e.g., about 0.15×10⁶ cells/mL or about 0.2×10⁶ cells/mL) in culture medium (e.g., FreeStyle™ medium) at a final volume.

22. The method of claim 21, wherein the plurality of mammalian cells are inoculated between 50 and 80 hours (e.g., about 55 hours, about 60 hours, about 65 hours, about 70 hours, about 72 hours, about 75 hours, or about 80 hours) prior to step a).

23. The method of step 21 or 22, wherein the plurality of mammalian cells are cultured under conditions suitable to allow for cell growth and amplification to a suitable cell density at transfection (e.g., between about 1.0×10⁶ cells/mL and about 3.0×10⁶ cells/mL (e.g., between 1.5×10⁶ cells/mL and 2.5×10⁶ cells/mL).

24. A method of manufacturing a lentiviral vector, comprising:
a) providing a composition comprising the lentiviral vector and at least one impurity (e.g., wherein the composition comprises a clarified cell harvest or a filtrate), and
b) contacting the composition with arginine or a salt thereof.

25. The method of claim 24, wherein one or more of:
i) the arginine is at a concentration of about 25-50 mM (about 50 mM), 50-100 mM (e.g., about 75 mM), 100-200 mM (e.g., about 150 mM), or 200-400 (e.g., about 300) mM arginine); or
ii) the arginine is at a concentration sufficient to increase level of transducing units of the lentiviral vector by about 10%-300%, 20%-180%, 30%-160%, 50%-150%, 75%-125% or about 100% compared to an otherwise similar composition, e.g., in an assay according to Example 7;
iii) after step b) the composition shows a total particle concentration per ml of less than 400,000, 300,000, 200,000, or 100,000, as measured by micro-flow imaging, e.g., in an assay described in Example 10, wherein optionally the particles comprise aggregated lentivirus;
iv) after step b) the composition shows a concentration of particles that are ≥10 μm per ml of less than about 5,000, 4,500, 4,000, 3,500, 3,000, or 2,500, as measured by micro-flow imaging, e.g., in an assay described in Example 10 wherein optionally the particles comprise aggregated lentivirus;
v) after step b) the composition shows a concentration of particles that are ≥25 μm per ml of less than about 500, 400, 300, or 200, as measured by micro-flow imaging, e.g., in an assay described in Example 10 wherein optionally the particles comprise aggregated lentivirus;
vi) after step b), the composition shows reduced aggregation of the lentiviral vector compared to an otherwise similar filtrate without addition of the arginine or salt thereof;
vii) recovery of transducing units of the lentiviral vector is greater than an otherwise similar control without arginine added, e.g., by at least about 10%, 20%, 50%, 100%, or 200%, e.g., as measured in an assay according to Example 7.

26. The method of claim 24 or 25, wherein b) comprises contacting the composition with a solution comprising the arginine and a buffer, wherein optionally the buffer is PIPES, wherein optionally the PIPES is at a concentration of from about 10 mM to about 50 mM, e.g., about of 20 mM in the solution.

27. The method of claim 26, wherein the solution has a pH of about 6.0 to about 7.0, e.g., about 6.5.

28. The method of claim 26 or 27, wherein the solution further comprises a salt, wherein optionally the salt is selected from the group consisting of sodium chloride, magnesium chloride, and calcium chloride, e.g., sodium chloride.

29. The method of claim 28, wherein the salt is present in the solution at a concentration of from about 25-150 mM, e.g., 50-100 mM, e.g., about 75 mM.

30. The method of claim 28 or 29, wherein the concentration of the salt in the solution has a pH of about 6.5.

31. The method of any of claims 26-30, wherein the solution further comprises a carbohydrate, e.g., a non-reducing carbohydrate, e.g., sucrose or trehalose.

32. The method of claim 31, wherein the carbohydrate is present in the solution at a concentration of from about 1% to about 10% by weight per volume of said solution, e.g., about 2% to about 5% by weight per volume of the solution, about 2.5% by weight per volume of the solution.

33. The method of claim 31 or 32, wherein the carbohydrate is present in the solution at a concentration of about 30-150 mM (about 73 mM), or 150-300 (e.g., about 220) mM.

34. The method of any of claims 26-33, wherein the solution further comprises one or both of NaCl (e.g., about 25-150 mM, e.g., 50-100 mM, e.g., about 75 mM), and sucrose (e.g., about 30-150 mM, e.g., about 73 mM, or e.g., about 150-300 mM, e.g., about 220 mM, or about 2.5% by weight per volume) of the solution.

35. The method of claim 26, wherein the solution comprises 20 mM PIPES, 75 mM sodium chloride, and 2.5% sucrose by weight per volume of the solution, and wherein the solution has a pH of about 6.5.

36. The method of claim 26, wherein the solution comprises 20 mM PIPES, 75 mM sodium chloride, and 73 mM sucrose and wherein the solution has a pH of about 6.5.

37. The method of claim 26, wherein the solution comprises 20 mM PIPES, 75 mM sodium chloride, and 220 mM sucrose and wherein the solution has a pH of about 6.5.

38. The method of claim 26, wherein the solution further comprises 20 mM PIPES, 75 mM arginine, e.g., arginine-HCl, and wherein the solution has a pH of about 6.5.

39. The method of any of claims 26-38, wherein the osmolality of said solution is from about 270 mOsm/kg to about 330 mOsm/kg, e.g., about 275 mOsm/kg to about 300 mOsm/k, e.g., about 285 mOsm/kg.

40. The method of any of claims 26-39, which further comprises: c) performing a purification step, e.g., a filtration step, on the composition of b), thereby producing a semi-purified composition comprising the lentiviral vector.

41. The method of claim 40, which further comprises, after step c), contacting the semi-purified composition with arginine or a salt thereof.

42. The method of any of claims 24-41, wherein the arginine encapsulates the lentiviral vector.

43. The method of any of claims 24-42, wherein the arginine stabilizes the lentiviral vector.

44. The method of any of claims 24-43, wherein the impurity comprises a protein (e.g., a host cell protein), a nucleic acid (e.g., a host cell nucleic acid), a carbohydrate (e.g., a host cell carbohydrate), a lipid, an enzyme, a salt, a buffer, or any combination thereof.

45. The method of any one of claims 1-44, wherein the cell density at transfection is between about 1.0×10⁶ cells/mL and about 3.0×10⁶ cells/mL (e.g., between 1.5×10⁶ cells/mL and 2.5×10⁶ cells/mL).

46. The method of any one of claims 1-45, wherein the viability of the cells is, or is assessed to be, at least 90% (e.g., 91%, 92%, 93%, 94%, 95%, 96%, 97%, 98%, 99%, or 100%) at the time of transfection.

47. The method of claim 46, wherein the viability of the cells is measured at or around the time of transfection (e.g., within 30 minutes prior to transfection).

48. The method of any one of claims 1-47, wherein the method is used for a process with two or more nucleic acids (e.g., two or more plasmids, e.g., two plasmids, three plasmids, four plasmids, or five plasmids).

49. An aqueous composition comprising a lentiviral vector, arginine, a 1,4-piperazinediethanesulfonic acid (PIPES) buffer, and a salt.

50. The aqueous composition of claim 49, wherein the arginine in the aqueous composition is at a concentration of about 25-50 mM (about 50 mM), 50-100 mM (e.g., about 75 mM), 100-200 mM (e.g., about 150 mM), or 200-400 (e.g., about 300) mM arginine), wherein optionally the PIPES aqueous composition is at a concentration of from about 10 mM to about 50 mM, e.g., about, e.g., 20 mM.

51. The aqueous composition of claim 49 or 50, wherein the aqueous composition has a pH of about 6.0 to about 7.0, e.g., about 6.5.

52. The aqueous composition of any one of claims 49-51, wherein the aqueous composition further comprises a salt, wherein optionally the salt is selected from the group consisting of sodium chloride, magnesium chloride, and calcium chloride.

53. The aqueous composition of any one of claims 49-52, wherein the salt is sodium chloride (NaCl).

54. The aqueous composition of any one of claims 49-53, wherein the salt in the aqueous composition is from about 25 mM to about 150 mM, e.g., about 50 mM to about 75 mM.

55. The aqueous composition of any one of claims 49-54, wherein the aqueous composition comprises 20 mM PIPES and 75 mM sodium chloride, and wherein the aqueous composition has a pH of about 6.5.

56. The aqueous composition of any one of claims 49-55, wherein the aqueous composition further comprises a carbohydrate, e.g., a non-reducing carbohydrate, e.g., sucrose or trehalose.

57. The aqueous composition of any one of claims 49-56, wherein the carbohydrate is present in the aqueous composition at a concentration of from about 1% to about 10% by weight per volume of said solution, e.g., about 2% to about 5% by weight per volume of the aqueous composition, about 2.5% by weight per volume of the aqueous composition.

58. The aqueous composition of any one of claims 49-57. wherein the carbohydrate is present in the aqueous composition at a concentration of from about 30-150 mM (about 73 mM), or 150-300 (e.g., about 220) mM.

59. The aqueous composition of any one of claims 49-58, wherein the aqueous composition comprises one or both of NaCl (e.g., about 25-150 mM, e.g., 50-100 mM, e.g., about 75 mM), and sucrose (e.g., about 30-150 mM, e.g., about 73 mM, or e.g., about 150-300 mM, e.g., about 220 mM, or about 2.5% by weight per volume) of the aqueous composition.

60. The aqueous composition of any one of claims 49-59, wherein the aqueous composition comprises 20 mM PIPES, 75 mM sodium chloride, and 2.5% sucrose by weight per volume of the aqueous composition and wherein the aqueous composition has a pH of about 6.5.

61. The aqueous composition of any one of claims 49-60, wherein the aqueous composition comprises 20 mM PIPES, 75 mM sodium chloride and 73 mM sucrose and wherein the aqueous composition has a pH of about 6.5.

62. The aqueous composition of any one of claims 49-61, wherein the aqueous composition comprises 20 mM PIPES, 75 mM sodium chloride and 220 mM sucrose and wherein the aqueous composition has a pH of about 6.5.

63. The aqueous composition of any one of claims 49-62, wherein the osmolality of said aqueous composition is from about 270 mOsm/kg to about 330 mOsm/kg, e.g., about 275 mOsm/kg to about 300 mOsm/k, e.g., about 285 mOsm/kg.

64. The aqueous composition of any one of claims 49-63, wherein the lentiviral vector of any preceding claims is present at a concentration of from about 3×10⁸ TU/mL to about 5×10⁸ TU/mL.

65. The aqueous composition of any of claims 49-64 which is free of one or more proteins selected from the group consisting of human serum albumin (HSA), recombinant human serum albumin (rHSA), bovine serum albumin (BSA), and a lipoprotein.

66. The lentiviral vector of any of the preceding claims, wherein lentiviral vector comprises a transgene, e.g., a transgene encoding a protein, e.g., a protein comprising a chimeric antigen receptor (CAR).

67. The lentiviral vector of any of the preceding claims, wherein said CAR comprises, in an N-terminal to C-terminal direction, an antigen binding domain, a transmembrane domain, and one or more signaling domains.

68. The lentiviral vector of any of the preceding claims, wherein said signaling domain comprises one or more primary signaling domains and/or one or more costimulatory signaling domains.

69. The lentiviral vector of any of the preceding claims, wherein one of said one or more primary signaling domains comprises a CD3-zeta stimulatory domain.

70. The lentiviral vector of any of the preceding claims, wherein one or more of said costimulatory signaling domains comprises an intracellular domain selected from a costimulatory protein selected from the group consisting of OX40, CD27, CD28, CDS, ICAM-1, LFA-1 (CD11a/CD18), ICOS(CD278), 4-1BB (CD137), CDS, ICAM-1, GITR, BAFFR, HVEM (LIGHTR), SLAMF7, NKp80 (KLRF1), NKp44, NKp30, NKp46, CD160, CD19, CD4, CD8alpha, CD8beta, IL2R beta, IL2R gamma, IL7R alpha, ITGA4, VLA1, CD49a, ITGA4, IA4, CD49D, ITGA6, VLA-6, CD49f, ITGAD, CD11d, ITGAE, CD103, ITGAL, CD11a, LFA-1, ITGAM, CD11b, ITGAX, CD11c, ITGB1, CD29, ITGB2, CD18, LFA-1, ITGB7, NKG2D, NKG2C, TNFR2, TRANCE/RANKL, DNAM1 (CD226), SLAMF4 (CD244, 2B4), CD84, CD96 (Tactile), CEACAM1, CRTAM, Ly9 (CD229), CD160 (BY55), PSGL1, CD100 (SEMA4D), CD69, SLAMF6 (NTB-A, Ly108), SLAM (SLAMF1, CD150, IPO-3), BLAME (SLAMF8), SELPLG (CD162), LTBR, LAT, GADS, SLP-76, PAG/Cbp, CD19a, and a ligand that specifically binds with CD83, e.g., a 4-1 BB (CD137) costimulatory domain or a CD28 costimulatory domain.

71. The lentiviral vector of any of the preceding claims, wherein said antigen binding domain is an scFv.

72. The lentiviral vector of any of the preceding claims, wherein said antigen binding domain binds to an antigen selected from the group consisting of CD19; CD123; CD22; CD30; CD171; CS-1; C-type lectin-like molecule-1, CD33; epidermal growth factor receptor variant III (EGFRvlll); ganglioside G2 (GD2); ganglioside GD3; TNF receptor family member B cell maturation (BCMA); Tn antigen ((Tn Ag) or (GalNAca-Ser/Thr)); prostate-specific membrane antigen (PSMA); Receptor tyrosine kinase-like orphan receptor 1 (ROR1); Fins-Like Tyrosine Kinase 3 (FLT3); Tumor-associated glycoprotein 72 (TAG72); CD38; CD44v6; Carcinoembryonic antigen (CEA); Epithelial cell adhesion molecule (EPCAM); B7H3 (CD276); KIT (CD1 17); lnterleukin-13 receptor subunit alpha-2; mesothelin; Interleukin 1 1 receptor alpha (IL-1 1 Ra); prostate stem cell antigen (PSCA); Protease Serine 21; vascular endothelial growth factor receptor 2 (VEGFR2); Lewis(Y) antigen; CD24; Platelet-derived growth factor receptor beta (PDGFR-beta); Stage-specific embryonic antigen-4 (SSEA-4); CD20; Folate receptor alpha; Receptor tyrosine-protein kinase ERBB2 (Her2/neu); Mucin 1, cell surface associated (MUC1); epidermal growth factor receptor (EGFR); neural cell adhesion molecule (NCAM); Prostase; prostatic acid phosphatase (PAP); elongation factor 2 mutated (ELF2M); Ephrin B2; fibroblast activation protein alpha (FAP); insulin-like growth factor 1 receptor (IGF-I receptor), carbonic anhydrase IX (CAIX); Proteasome (Prosome, Macropain) Subunit, Beta Type, 9 (LMP2); glycoprotein 100 (gp100); oncogene fusion protein consisting of breakpoint cluster region (BCR) and Abelson murine leukemia viral oncogene homolog 1 (Abl) (bcr-abl); tyrosinase; ephrin type-A receptor 2 (EphA2); Fucosyl GM1; sialyl Lewis adhesion molecule (sLe); ganglioside GM3; transglutaminase 5 (TGS5); high molecular weight-melanoma-associated antigen (HMWMAA); o-acetyl-GD2 ganglioside (OAcGD2); Folate receptor beta; tumor endothelial marker 1 (TEM1/CD248); tumor endothelial marker 7-related (TEM7R); claudin 6 (CLDN6); thyroid stimulating hormone receptor (TSHR); G protein-coupled receptor class C group 5, member D (GPRC5D); chromosome X open reading frame 61 (CXORF61); CD97; CD179a; anaplastic lymphoma kinase (ALK); Polysialic acid; placenta-specific 1 (PLAC1); hexasaccharide portion of globoH glycoceramide (GloboH); mammary gland differentiation antigen (NY-BR-1); uroplakin 2 (UPK2); Hepatitis A virus cellular receptor 1 (HAVCR1); adrenoceptor beta 3 (ADRB3); pannexin 3 (PANX3); G protein-coupled receptor 20 (GPR20); lymphocyte antigen 6 complex, locus K 9 (LY6K); Olfactory receptor 51 E2 (OR51 E2); TCR Gamma Alternate Reading Frame Protein (TARP); Wilms tumor protein (WT1); Cancer/testis antigen 1 (NY-ESO-1); Cancer/testis antigen 2 (LAGE-1 a); Melanoma-associated antigen 1 (MAGE-A1); ETS translocation-variant gene 6, located on chromosome 12p (ETV6-AML); sperm protein 17 (SPA17); X Antigen Family, Member 1 A (XAGE1); angiopoietin-binding cell surface receptor 2 (Tie 2); melanoma cancer testis antigen-1 (MAD-CT-1); melanoma cancer testis antigen-2 (MAD-CT-2); Fos-related antigen 1; tumor protein p53 (p53); p53 mutant; prostein; surviving; telomerase; prostate carcinoma tumor antigen-1, melanoma antigen recognized by T cells 1; Rat sarcoma (Ras) mutant; human Telomerase reverse transcriptase (hTERT); sarcoma translocation breakpoints; melanoma inhibitor of apoptosis (ML-IAP); ERG (transmembrane protease, serine 2 (TMPRSS2) ETS fusion gene); N-Acetyl glucosaminyl-transferase V (NA17); paired box protein Pax-3 (PAX3); Androgen receptor; Cyclin B1; v-myc avian myelocytomatosis viral oncogene neuroblastoma derived homolog (MYCN); Ras Homolog Family Member C (RhoC); Tyrosinase-related protein 2 (TRP-2); Cytochrome P450 1 B1 (CYP1 B1); CCCTC-Binding Factor (Zinc Finger Protein)-Like, Squamous Cell Carcinoma Antigen Recognized By T Cells 3 (SART3); Paired box protein Pax-5 (PAX5); proacrosin binding protein sp32 (OY-TES1); lymphocyte-specific protein tyrosine kinase (LCK); A kinase anchor protein 4 (AKAP-4); synovial sarcoma, X breakpoint 2 (SSX2); Receptor for Advanced Glycation Endproducts (RAGE-1); renal ubiquitous 1 (RU1); renal ubiquitous 2 (RU2); legumain; human papilloma virus E6 (HPV E6); human papilloma virus E7 (HPV E7); intestinal carboxyl esterase; heat shock protein 70-2 mutated (mut hsp70-2); CD79a; CD79b; CD72; Leukocyte-associated immunoglobulin-like receptor 1 (LAIR1); Fc fragment of IgA receptor (FCAR or CD89); Leukocyte immunoglobulin-like receptor subfamily A member 2 (LILRA2); CD300 molecule-like family member f (CD300LF); C-type lectin domain family 12 member A (CLECI2A); bone marrow stromal cell antigen 2 (BST2); EGF-like module-containing mucin-like hormone receptor-like 2 (EMR2); lymphocyte antigen 75 (LY75); Glypican-3 (GPC3); Fc receptor-like 5 (FCRL5); and immunoglobulin lambda-like polypeptide 1 (IGLL1), e.g., to CD19, CD22, mesothelin, or CD123.

73. The lentiviral vector of any of the preceding claims, wherein said CAR comprises an anti-CD19 antibody or a fragment thereof, a 4-1 BB (CD137) transmembrane domain, and a CD3-zeta signaling domain.

74. The lentiviral vector of any of the preceding claims, comprises a second transgene, e.g., a second transgene encoding a second protein, e.g., a second protein comprising a second chimeric antigen receptor (CAR).

75. A method of manufacturing a lentiviral vector, comprising:
a) providing a population of human cells (e.g., 293 cells);
b) introducing into the cells nucleic acid encoding a retroviral packaging protein, a retroviral envelope protein, and a therapeutic effector, e.g., a therapeutic protein (e.g., a CAR),
c) contacting the cells with benzonase at a time about 2-6 (e.g., about 3), 4-10 (e.g., about 6), 6-40, 10-40, 10-30 (e.g., about 24), or about 20 hours after step b); and
d) culturing the cells under conditions suitable for production of the lentiviral vector.

76. The method of claim 75, wherein Benzonase is added 6-10 hours, 10-20 hours, 20-30 hours, 30-40 hours, or 40-50 hours, before harvest of lentiviral vector from the cells.

77. A method of manufacturing a lentiviral vector, comprising:
a) providing a population of human cells (e.g., 293 cells);
b) introducing into the cells nucleic acid encoding a retroviral packaging protein, a retroviral envelope protein, and a therapeutic effector, e.g., a therapeutic protein (e.g., a CAR),
c) contacting the cells with benzonase (e.g., 3-24 hours after step b);
d) culturing the cells under conditions suitable for production of the lentiviral vector;
e) harvesting the lentiviral vectors from cells 6-10 hours, 10-20 hours, 20-30 hours, 30-40 hours, or 40-50 hours after step c).

78. The method of any of claims 75-77, wherein benzonase is at a concentration of about 10-40 U/mL, e.g., 20-30 U/mL, e.g., about 25 U/mL.

79. The method of any of claims 75-78, wherein benzonase is at a concentration of about 3-60 U/mL, 3-10 U/mL, 3-7 U/mL, 4-6 U/mL, or about 5 U/mL.

80. The method of any of claims 75-79, wherein the benzonase is at a concentration of 5-50, 5-15, 15-25, or 25-50 U/mL.

81. The method of any of claims 75-80, which further comprises, before step c), contacting the benzonase with MgCl₂, e.g., at about 1-5 mM, 1-3 mM, or about 2 mM.

82. A method of manufacturing a lentiviral vector, comprising:
a) providing a plurality of mammalian (e.g., human) cells, wherein the plurality of mammalian cells do not comprise SV40 large T antigen (e.g., wherein the cell is a fibroblast cell, e.g., an embryonic kidney fibroblast cell, e.g., an Expi293F cell), wherein the plurality of mammalian cells comprise a nucleic acid (e.g., DNA) encoding one or more retroviral packaging protein, a retroviral envelope protein, and a therapeutic effector, e.g., a therapeutic protein (e.g., a CAR),
b) culturing the cell under conditions suitable for production of the lentiviral vector.

83. The method of claim 82, wherein a) comprises introducing the nucleic acid into the plurality of mammalian cells.

84. The method of any of claims 75-83, which further comprises at least partially separating the lentiviral vector from the plurality of mammalian cells.

85. The method of claim 83 or 84, wherein the one or more retroviral packaging proteins comprises a lentiviral gag, a lentiviral pol, or a lentiviral rev, or any combination thereof.

86. The method of any of claims 83-85, wherein the retroviral envelope protein comprises a VSV-G.

87. A preparation of lentiviral vector, comprising:
a plurality of lentiviral vectors that comprise:
a) a lentivirus genome encoding a therapeutic effector, e.g., a therapeutic protein (e.g., a CAR), and
b) an envelope enclosing the lentivirus genome (wherein optionally the envelope comprises VSV-G);
wherein the preparation comprises at least 5×10⁷, 1×10⁸, 1×10⁹, or 1×10¹⁰, transducing units;
wherein the preparation comprises less than 10 μg/ml or less than 1 μg/ml of nucleic acid (e.g., DNA) encoding SV40 large T antigen.

88. The method of any of claims 83-87, wherein the plurality of lentiviral vectors comprises at least 1×10⁹, 2×10⁹, 5×10⁹, or 1×10¹⁰, 2×10¹⁰, 5×10¹⁰, 1×10¹¹, 2×10¹¹, 5×10¹, or 1×10¹² of the cells.

89. The method of any of claims 83-88, wherein the plurality of mammalian cells are in a culture volume of at least 5, 10, 20, 50, 100, 200, or 500 L.

90. The method of any of claim 83-89, which comprises culturing the plurality of mammalian cells in serum-free medium.

91. The method of any of claim 83-90, wherein the plurality of mammalian cells are grown in suspension.

92. The method of any of claims 83-91, wherein the CAR comprises a CD19 CAR (e.g., a humanized CD19 CAR, e.g., as described in WO2014153270A1.

93. The method of any of claims 83-91, wherein the CAR comprises a dual CAR (e.g., a humanized CD19-CD22 CAR, e.g., as described in WO2016164731A2.

94. The method of any of claims 83-91, wherein the nucleic acid encoding a CAR further encodes a shRNA, e.g., as described in WO2017049166A.

95. The method of any of claims 83-94, wherein the lentiviral vector is produced in cells cultured in the absence of serum.

96. The method or composition of any of the preceding claims, wherein the lentiviral vector is characterized by a hydrodynamic radius of 100±25 nm as measured by dynamic light scattering (DLS).

97. The method or composition of any of the preceding claims, wherein the lentiviral vector maintains said hydrodynamic radius of 100±25 nm within a temperature range of from 25° C. to 55° C.

98. The method or composition of any of the preceding claims, wherein the lentiviral vector is characterized by a polydispersity of from 10% to 25%.

99. The method or composition of any of the preceding claims, wherein the lentiviral vector maintains said polydispersity of from 10% to 25% within a temperature range of from 25° C. to 55° C.

100. The method or composition of any of the preceding claims, wherein the lentiviral vector maintains a concentration after 3 freeze/thaw cycles of from about 70% to about 100% relative to the concentration of said lentiviral vector in said aqueous composition prior to said freeze/thaw cycles, wherein each of said freeze/thaw cycles comprises freezing said aqueous composition and subsequently allowing said aqueous composition to thaw at room temperature.

101. The method or composition of any of the preceding claims, wherein the lentiviral vector maintains said concentration of from about 70% to about 100% after 6-10 of said freeze/thaw cycles, e.g., after 6-9 of said freeze/thaw cycles.

102. An aqueous composition comprising a lentiviral vector, a buffer selected from the group consisting of a phosphate buffer, a sodium citrate buffer, a 2-(N-morpholino) ethanesulfonic acid (MES) buffer, a 3-morpholinopropane-1-sulfonic acid (MOPS) buffer, and a salt.

103. The aqueous composition of claim 102, wherein said salt is selected from the group consisting of sodium chloride, magnesium chloride, and calcium chloride.

104. The aqueous composition of claim 101 or 103, wherein said aqueous composition further comprises a non-reducing carbohydrate selected from the group consisting of sucrose and trehalose.
